(19) United States
(12) Patent Application Publication
(10) Pub. No.: US 2021/0123075 A1
(43) Pub. Date: Apr. 29, 2021

(54) COMPOSITIONS AND METHODS FOR IMMUNOONCOLOGY

(71) Applicants: NOVARTIS AG, Basel (CH); INTELLIA THERAPEUTICS, INC., Cambridge, MA (US)

(72) Inventors: Ming-Wei CHEN, Winchester, MA (US); Glenn DRANOFF, Lexington, MA (US)

(21) Appl. No.: 17/058,381

(22) PCT Filed: Jun. 7, 2019
(86) PCT No.: PCT/US2019/036111

§ 371 Date: Nov. 24, 2020

Related U.S. Application Data
(60) Provisional application No. 62/682,626, filed on Jun. 8, 2018.

(51) Int. Cl. C12N 15/86; C12N 9/22; C12N 15/113

(52) U.S. Cl. CPC C12N 15/86; C12N 9/22; C12N 15/1138; C12N 2710/10043; C12N 2310/321; C12N 2310/20; C12N 2310/313

(57) ABSTRACT

The present disclosure is directed to genome editing systems, reagents and methods for immunooncology.

[0001] This application claims benefit of priority to U.S. Provisional Patent Application Ser. No. 62/682,626, filed Jun. 8, 2018. It is incorporated herein by reference in its entirety.

### SEQUENCE LISTING

[0002] The instant application contains a Sequence Listing which has been submitted electronically in ASCII format and is hereby incorporated by reference in its entirety. Said ASCII copy, created on May 25, 2018, is named PAT058135-US-PSP_SL.txt and is 1,011,516 bytes in size.

### BACKGROUND

[0003] CRISPRs (Clustered Regularly Interspaced Short Palindromic Repeats) evolved in bacteria as an adaptive immune system to defend against viral attack. Upon exposure to a virus, short segments of viral DNA are integrated into the CRISPR locus of the bacterial genome. RNA is transcribed from a portion of the CRISPR locus that includes the viral sequence. That RNA, which comprises a sequence complementary to the viral genome, mediates targeting of a Cas9 protein to the sequence in the viral genome. The Cas9 protein cleaves and thereby silences the viral target.

[0004] Recently, the CRISPR/Cas system has been adapted for genome editing in eukaryotic cells. The introduction of site-specific single-strand breaks (SSBs) or double-strand breaks (DSBs) allows for target sequence alteration through, for example, non-homologous end-joining (NHEJ) or homology-directed repair (HDR).

### SUMMARY

[0005] In embodiment 1, the disclosure provides a gRNA molecule comprising a targeting domain that is complementary to a sequence within a genomic region selected from chr1:151340619-151343198, chr1:151343321-151343462, chr1:151343660-151343902, chr1:151344176-151344298, chr1:151344396-151344556, chr1:151344707-151344867, chr1:151345085-151345208, chr1:151345907-151345981, chr1:151346184-151346353, chr1:151346461-151346626, and chr1:151347190-151347313, wherein the genomic region is according to human reference genome hg38.

[0006] In embodiment 2, the disclosure provides a gRNA molecule comprising a targeting domain that is complementary to a sequence within a genomic region selected from chr13:36819181-36819977, chr13:36825407-36825555, and chr13:36827622-36829623, wherein the genomic region is according to human reference genome hg38, or a targeting domain that is complementary to a sequence within a genomic region selected from chr16:10877379-10877398, wherein the genomic region is according to human reference genome hg38.

[0007] In embodiment 3, the disclosure provides the gRNA molecule of either of embodiments 1 or 2, wherein the gRNA molecule comprises a tracr and crRNA, wherein the crRNA comprises the targeting domain.

[0008] In embodiment 4, the disclosure provides the gRNA molecule of embodiment 1, wherein the targeting domain comprises any one of SEQ ID NO: 925-1316, 1317-1336, 1337-1376, 1377-1390, 1391-1410, 1411-1432, 1433-1445, 1446-1457, 1458-1495, 1496-1518, 1519-1536 or a fragment thereof.

[0009] In embodiment 5, the disclosure provides the gRNA molecule of embodiment 2, wherein the targeting domain comprises any one of SEQ ID NO: 1537-1717, 1718-1727, 1728-1848 or a fragment thereof, or wherein the targeting domain comprises any one of SEQ ID NO: 1849 or a fragment thereof.

[0010] In embodiment 6, the disclosure provides a plurality of gRNA molecules, comprising:
[0011] (a) at least one gRNA molecule comprising a a targeting domain that is complementary to a first target sequence selected from a molecule that regulates the expression of MHC II, optionally selected from HLA-DM, HLA-DO, HLA-DR, HLA-DQ, HLA-DP, CIITA, RFXANK, RFXAP, RFX1, RFX5, NF-YA, NF-YB, NF-YC, X2BP, and OCAB; and
[0012] (b) at least one gRNA molecule comprising a targeting domain that is complementary to a second target sequence selected from a component of the T cell system, optionally selected from TRAC, TRBC1, TRBC2, CD247, CD3, CD3D, CD3E, CD3G, DCK, CD52, FKBP1A, and NR3C1.

[0013] In embodiment 7 the disclosure provides the gRNA molecule of embodiment 6, wherein the gRNA molecule comprises a tracr and crRNA, wherein the crRNA comprises the targeting domain.

[0014] In embodiment 8, the disclosure provides the of gRNA molecules of embodiment 7, further comprising at least one gRNA molecule comprising a tracr and crRNA, wherein the crRNA comprises a targeting domain that is complementary to a third target sequence selected from a molecule that regulates the expression of MHC I, optionally selected from HLA-A, HLA-B, HLA-C, B2M, and NLRC5.

[0015] In embodiment 9, the disclosure provides the plurality of gRNA molecules of embodiment 7 or 8, wherein the first target sequence is selected from any one of CIITA, RFXAP, and RFX5.

[0016] In embodiment 10, the disclosure provides the plurality of gRNA molecules of any one of embodiments 7-9, wherein the second target sequence is selected from any one of TRAC, TRBC1, CD3DEG, and TRBC2.

[0017] In embodiment 11, the disclosure provides the plurality of gRNA molecules of embodiment 8, wherein the first target sequence is selected from any one of CIITA, RFXAP, and RFX5; the second target sequence is selected from any one of TRAC, TRBC1, CD3DEG, and TRBC2; and the third target sequence is B2M.

[0018] In embodiment 12, the disclosure provides the plurality of gRNA molecules of any one of embodiments 7-11, wherein the first target sequence is RFX5, and the targeting domain is complementary to a sequence within a genomic region selected from chr1:151340619-151343198, chr1:151343321-151343462, chr1:151343660-151343902, chr1:151344176-151344298, chr1:151344396-151344556, chr1:151344707-151344867, chr1:151345085-151345208, chr1:151345907-151345981, chr1:151346184-151346353, chr1:151346461-151346626, and chr1:151347190-151347313, wherein said genomic region is according to hg38.

[0019] In embodiment 13, the disclosure provides the plurality of gRNA molecules of any one of embodiments 7-11, wherein the first target sequence is RFXAP, and the targeting domain is complementary to a sequence within a genomic region selected from chr13:36819181-36819977, chr13:36825407-36825555, and chr13:36827622-36829623, wherein said genomic region is according to hg38.

[0020] In embodiment 14, the disclosure provides the plurality of gRNA molecules of any one of embodiments 7-11, wherein the first target sequence is CIITA, and the targeting domain is complementary to a sequence within a genomic region selected from chr16:10877379-10877398, wherein said genomic region is according to hg38.

[0021] In embodiment 15, the disclosure provides the plurality of gRNA molecules of any one of embodiments 7-11, wherein the first target sequence is RFX5 or RFXAP, and the targeting domain is complementary to a sequence within a genomic region selected from chr1:151346191-151346216, chr13:36819493-36819518, chr13:36819686-36819711, chr13:36819687-36819712, chr13:36819688-36819713, chr13:36819809-36819834, and chr13:36819343-36819368.

[0022] In embodiment 16, the disclosure provides the plurality of gRNA molecules of any of embodiments 7-11, wherein the targeting domain that is complementary to the first target sequence comprises any one of SEQ ID NO: 925-1316, 1317-1336, 1337-1376, 1377-1390, 1391-1410, 1411-1432, 1433-1445, 1446-1457, 1458-1495, 1496-1518, 1519-1536, 1537-1717, 1718-1727, 1728-1848, 1849 or a fragment thereof, or any sequence in Tables 1a-c.

[0023] In embodiment 17, the disclosure provides the plurality of gRNA molecules of any one of embodiments 7-11, wherein the targeting domain that is complementary to the first target sequence comprises any one of SEQ ID NO: 925-1316, 1317-1336, 1337-1376, 1377-1390, 1391-1410, 1411-1432, 1433-1445, 1446-1457, 1458-1495, 1496-1518, 1519-1536, 1537-1717, 1718-1727, 1728-1848, 1849 or a fragment thereof.

[0024] In embodiment 18, the disclosure provides the plurality of gRNA molecules of any one of embodiments 7-11, wherein the targeting domain that is complementary to the first target sequence comprises any one of SEQ ID NO: 925-1316, 1317-1336, 1337-1376, 1377-1390, 1391-1410, 1411-1432, 1433-1445, 1446-1457, 1458-1495, 1496-1518, 1519-1536, 1537-1717, 1718-1727, 1728-1848, 1849 or a fragment thereof.

[0025] In embodiment 19, the disclosure provides the plurality of gRNA molecules of any one of embodiments 7-11, wherein the targeting domain that is complementary to the first target sequence comprises any one of SEQ ID NO: 925-1316, 1317-1336, 1337-1376, 1377-1390, 1391-1410, 1411-1432, 1433-1445, 1446-1457, 1458-1495, 1496-1518, 1519-1536, 1537-1717, 1718-1727, 1728-1848, 1849 or a fragment thereof.

[0026] In embodiment 20, the disclosure provides the plurality of gRNA molecules of any one of embodiments 7-11, wherein the targeting domain that is complementary to the first target sequence comprises any one of SEQ ID NO: 925-1316, 1317-1336, 1337-1376, 1377-1390, 1391-1410, 1411-1432, 1433-1445, 1446-1457, 1458-1495, 1496-1518, 1519-1536, 1537-1717, 1718-1727, 1728-1848, 1849 or a fragment thereof.

[0027] In embodiment 21, the disclosure provides the gRNA molecule of any of embodiments 1-6 or the plurality of gRNA molecules of any of embodiments 7-20, wherein at least one of the targeting domains comprises 17, 18, 19 or, 20 consecutive nucleic acids of any one of the recited targeting domain sequences.

[0028] In embodiment 22, the disclosure provides the gRNA molecule of any of embodiments 1-6 or the plurality of gRNA molecules of any of embodiments 7-20, wherein at least one of the targeting domains consists of 17, 18, 19, or 20 consecutive nucleic acids of any one of the recited targeting domain sequences.

[0029] In embodiment 23, the disclosure provides the gRNA molecule or the plurality of gRNA molecules of embodiment 21 or 22, wherein the 17, 18, 19, or 20 consecutive nucleic acids of any one of the recited targeting domain sequences are the 17, 18, 19, or 20 consecutive nucleic acids disposed at the 3′ end of the recited targeting domain sequence.

[0030] In embodiment 24, the disclosure provides the gRNA molecule or the plurality of gRNA molecules of embodiment 21 or 22, wherein the 17, 18, 19, or 20 consecutive nucleic acids of any one of the recited targeting domain sequences are the 17, 18, 19, or 20 consecutive nucleic acids disposed at the 5′ end of the recited targeting domain sequence.

[0031] In embodiment 25, the disclosure provides the gRNA molecule or the plurality of gRNA molecules of embodiment 21 or 22, wherein the 17, 18, 19, or 20 consecutive nucleic acids of any one of the recited targeting domain sequences do not comprise either the 5′ or 3′ nucleic acid of the recited targeting domain sequence.

[0032] In embodiment 26, the disclosure provides the gRNA molecule of any of embodiments 1-6 or the plurality of gRNA molecules of any of embodiments 7-20, wherein the targeting domain consists of the recited targeting domain sequence.

[0033] In embodiment 27, the disclosure provides the gRNA molecule of any of embodiments 1-6 or the plurality of gRNA molecules of any of embodiments 7-20, wherein a portion of at least one crRNA and a portion of at least one tracr hybridize to form a flagpole comprising SEQ ID NO: 50 or SEQ ID NO: 51.

[0034] In embodiment 28, the disclosure provides the gRNA molecule or the plurality of gRNA molecules of embodiment 27, wherein the flagpole further comprises a first flagpole extension, located 3′ to the crRNA portion of the flagpole, wherein said first flagpole extension comprises SEQ ID NO: 55.

[0035] In embodiment 29, the disclosure provides the gRNA molecule or the plurality of gRNA molecules of embodiment 27 or 28, wherein the flagpole further comprises a second flagpole extension located 3′ to the crRNA portion of the flagpole and, if present, the first flagpole extension, wherein said second flagpole extension comprises SEQ ID NO: 57.

[0036] In embodiment 30, the disclosure provides the gRNA molecule of any one of embodiments 1-6 or the plurality of gRNA molecules of any of embodiments 7-29, wherein at least one tracr comprises:
[0037] (a) SEQ ID NO: 87, optionally further comprising, at the 3′ end, an additional 1, 2, 3, 4, 5, 6, or 7 uracil (U) nucleotides;
[0038] (b) SEQ ID NO: 65; or
[0039] (c) SEQ ID NO: 84.

[0040] In embodiment 31, the disclosure provides the gRNA molecule or the plurality of gRNA molecules of embodiment 30, wherein the crRNA portion of the flagpole comprises SEQ ID NO: 79 or SEQ ID NO: 80.

[0041] In embodiment 32, the disclosure provides the gRNA molecule of any one of embodiments 1-6 or the plurality of gRNA molecules of any of embodiments 7-29, wherein the tracr comprises SEQ ID NO: 53 or SEQ ID NO: 54, and optionally, if a first flagpole extension is present, a first tracr extension, disposed 5′ to SEQ ID NO: 53 or SEQ ID NO: 54, said first tracr extension comprising SEQ ID NO: 56.

[0042] In embodiment 33, the disclosure provides the gRNA molecule of any one of embodiments 1-6 or the plurality of gRNA molecules of any of embodiments 7-32, wherein at least one targeting domain and tracr are disposed on separate nucleic acid molecules.

[0043] In embodiment 34, the disclosure provides the gRNA molecule of any one of embodiments 1-6 or the plurality of gRNA molecules of any of embodiments 7-25, wherein at least one crRNA comprises, from 5′ to 3′, [targeting domain]—:
[0044] (a) SEQ ID NO: 50;
[0045] (b) SEQ ID NO: 51;
[0046] (c) SEQ ID NO: 77;
[0047] (d) SEQ ID NO: 78;
[0048] (e) SEQ ID NO: 79;
[0049] (f) SEQ ID NO: 80; or
[0050] (g) SEQ ID NO: 81.

[0051] In embodiment 35, the disclosure provides the gRNA molecule of any one of embodiments 1-6 or the plurality of gRNA molecules of any of embodiments 7-25 or 21, wherein at least one tracr comprises, from 5′ to 3′:
[0052] (a) SEQ ID NO: 53;
[0053] (b) SEQ ID NO: 54;
[0054] (c) SEQ ID NO: 82;
[0055] (d) SEQ ID NO: 83;
[0056] (e) SEQ ID NO: 65;
[0057] (f) SEQ ID NO: 84;
[0058] (g) SEQ ID NO: 87;
[0059] (h) SEQ ID NO: 76;
[0060] (i) SEQ ID NO: 85;
[0061] (j) SEQ ID NO: 86;
[0062] (k) any of (a) to (j), above, further comprising, at the 3′ end, at least 1, 2, 3, 4, 5, 6 or 7 uracil (U) nucleotides, e.g., 1, 2, 3, 4, 5, 6, or 7 uracil (U) nucleotides;
[0063] (l) any of (a) to (k), above, further comprising, at the 3′ end, at least 1, 2, 3, 4, 5, 6 or 7 adenine (A) nucleotides, e.g., 1, 2, 3, 4, 5, 6, or 7 adenine (A) nucleotides; or
[0064] (m) any of (a) to (l), above, further comprising, at the 5′ end (e.g., at the 5′ terminus), at least 1, 2, 3, 4, 5, 6 or 7 adenine (A) nucleotides, e.g., 1, 2, 3, 4, 5, 6, or 7 adenine (A) nucleotides.

[0065] In embodiment 36, the disclosure provides the gRNA molecule of any one of embodiments 1-6 or the plurality of gRNA molecules of any of embodiments 7-25, wherein at least one targeting domain and tracr are disposed on separate nucleic acid molecules, and wherein the nucleic acid molecule comprising the targeting domain comprises SEQ ID NO: 79, optionally disposed immediately 3′ to the targeting domain, and the nucleic acid molecule comprising the tracr comprises, e.g., consists of, SEQ ID NO: 65.

[0066] In embodiment 37, the disclosure provides the gRNA molecule or the plurality of gRNA molecules of embodiment 30 or 31, wherein at least one targeting domain and tracr are disposed on a single nucleic acid molecule, and wherein the tracr is disposed 3′ to the targeting domain.

[0067] In embodiment 38, the disclosure provides the gRNA molecule or the plurality of gRNA molecules of embodiment 37, further comprising a loop, disposed 3′ to the targeting domain and 5′ to the tracr.

[0068] In embodiment 39, the disclosure provides the gRNA molecule or the plurality of gRNA molecules of embodiment 38, wherein the loop comprises SEQ ID NO: 52.

[0069] In embodiment 40, the disclosure provides the gRNA molecule of any one of embodiments 1-6 or the plurality of gRNA molecules of any of embodiments 7-25, wherein a gRNA molecule in the plurality comprises, from 5′ to 3′, [targeting domain]—:
[0070] (a) SEQ ID NO: 71;
[0071] (b) SEQ ID NO: 72;
[0072] (c) SEQ ID NO: 73;
[0073] (d) SEQ ID NO: 74;
[0074] (e) SEQ ID NO: 75; or
[0075] (f) any of (a) to (e), above, further comprising, at the 3′ end, 1, 2, 3, 4, 5, 6 or 7 uracil (U) nucleotides.

[0076] In embodiment 41, the disclosure provides the gRNA molecule of any one of embodiments 1-6 or the plurality of gRNA molecules of any of embodiments 7-25, wherein the targeting domain and the tracr are disposed on a single nucleic acid molecule, and wherein said nucleic acid molecule comprises or consists of said targeting domain and SEQ ID NO: 71, optionally disposed immediately 3′ to said targeting domain.

[0077] In embodiment 42, the disclosure provides the gRNA molecule of any one of embodiments 1-6 or the plurality of gRNA molecules of embodiments 7-25, wherein the targeting domain and the tracr are disposed on a single nucleic acid molecule, and wherein said nucleic acid molecule comprises or consists of said targeting domain and SEQ ID NO: 75, optionally disposed immediately 3′ to said targeting domain.

[0078] In embodiment 43, the disclosure provides the gRNA molecule of any one of embodiments 1-6 or the plurality of gRNA molecules of any of embodiments 7-42, wherein at least one of the nucleic acid molecules comprising the gRNA molecule comprises:
[0079] (a) a, e.g., three, phosphorothioate modification(s) at the 3′ end of said nucleic acid molecule or molecules;
[0080] (b) a, e.g., three, phosphorothioate modification(s) at the 5′ end of said nucleic acid molecule or molecules:
[0081] (c) a, e.g., three, 2′-O-methyl modification(s) at the 3′ end of said nucleic acid molecule or molecules;
[0082] (d) a, e.g., three, 2′-O-methyl modification(s) at the 5′ end of said nucleic acid molecule or molecules;
[0083] (e) a 2′ O-methyl modification at each of the 4^{th}-to-terminal, 3^{rd}-to-terminal, and 2^{nd}-to-terminal 3′ residues of said nucleic acid molecule or molecules; or
[0084] (f) any combination thereof.

[0085] In embodiment 44, the disclosure provides the gRNA molecule of any one of embodiments 1-6 or the plurality of gRNA molecules of any of embodiments 7-43, wherein when a CRISPR system (e.g., an ribonuclear protein complex (RNP) as described herein) comprising the gRNA molecule is introduced into a cell, an indel is formed at or near the target sequence complementary to the targeting domain of the gRNA molecule.

[0086] In embodiment 45, the disclosure provides the gRNA molecule or the plurality of gRNA molecules of embodiment 44, wherein the indel comprises a deletion of 10 or greater than 10 nucleotides, optionally 11, 12, 13, 14, 15, 16, 17, 18, 19, 20, 21, 22, 23, 24, 25, 26, 27, 28, 29, 30, 31, 32, 33, 34, or 35 nucleotides.

[0087] In embodiment 46, the disclosure provides the gRNA molecule of any one of embodiments 1-6 or the plurality of gRNA molecules of any of embodiments 7-45, wherein when a CRISPR system (e.g., an RNP as described herein) comprising the gRNA molecule is introduced into a population of cells, an indel is formed at or near the target sequence complementary to the targeting domain of the gRNA molecule in at least about 40%, e.g., at least about 50%, e.g., at least about 60%, e.g., at least about 70%, e.g., at least about 80%, e.g., at least about 90%, e.g., at least about 95%, e.g., at least about 96%, e.g., at least about 97%, e.g., at least about 98%, e.g., at least about 99%, of the cells of the population.

[0088] In embodiment 47, the disclosure provides the gRNA molecule or the plurality of gRNA molecules of embodiment 45, wherein the indel comprising a deletion of 10 or greater than 10 nucleotides is detected in at least about 5%, optionally at least about 10%, 15%, 20%, 25%, 30% or more, of the cells of the population.

[0089] In embodiment 48, the disclosure provides the gRNA molecule or the plurality of gRNA molecules of any one of embodiments 45-47, wherein the indel is as measured by next generation sequencing (NGS).

[0090] In embodiment 49, the gRNA molecule of any one of embodiments 1-6, wherein when a CRISPR system (e.g., an RNP as described herein) comprising the gRNA molecule is introduced into a cell, expression of a molecule that regulates the expression of MHC II, optionally selected from HLA-DM, HLA-DO, HLA-DR, HLA-DQ, HLA-DP, CIITA, RFXANK, RFXAP, RFX1, RFX5, NF-YA, NF-YB, NF-YC, X2BP, and OCAB, is reduced or eliminated in said cell.

[0091] In embodiment 50, the disclosure provides the gRNA molecule of any one of embodiments 1-6, wherein when a CRISPR system (e.g., an RNP as described herein) comprising the gRNA molecule is introduced into a cell, a function of a molecule that regulates the expression of MHC II, optionally selected from HLA-DM, HLA-DO, HLA-DR, HLA-DQ, HLA-DP, CIITA, RFXANK, RFXAP, RFX1, RFX5, NF-YA, NF-YB, NF-YC, X2BP, and OCAB, is reduced or eliminated in said cell.

[0092] In embodiment 51, the disclosure provides the gRNA molecule of embodiment 50, wherein the function of the molecule that regulates the expression of MHC II is reduced, e.g., by at least about 10%, 20%, 30%, 40% or 50%, but said function is not reduced by more than about 80%, or eliminated, in said cell.

[0093] In embodiment 52, the disclosure provides the plurality of gRNA molecules of any of embodiments 7-48, wherein when a CRISPR system (e.g., an RNP as described herein) comprising the plurality of gRNA molecules is introduced into a cell, expression of at least one molecule that regulates the expression of MHC II, optionally selected from HLA-DM, HLA-DO, HLA-DR, HLA-DQ, HLA-DP, CIITA, RFXANK, RFXAP, RFX1, RFX5, NF-YA, NF-YB, NF-YC, X2BP, and OCAB, and at least one component of the T cell system, optionally selected from TRAC, TRBC1, TRBC2, CD247, CD3, CD3D, CD3E, CD3G, DCK, CD52, FKBP1A, and NR3C1, is reduced or eliminated in said cell.

[0094] In embodiment 53, the disclosure provides the plurality of gRNA molecules of any of embodiments 7-48, wherein when a CRISPR system (e.g., an RNP as described herein) comprising the plurality of gRNA molecules is introduced into a cell, a function of at least one molecule that regulates the expression of MHC II, optionally selected from HLA-DM, HLA-DO, HLA-DR, HLA-DQ, HLA-DP, CIITA, RFXANK, RFXAP, RFX1, RFX5, NF-YA, NF-YB, NF-YC, X2BP, and OCAB, and at least one component of the T cell system, optionally selected from TRAC, TRBC1, TRBC2, CD247, CD3, CD3D, CD3E, CD3G, DCK, CD52, FKBP1A, and NR3C1, is reduced or eliminated in said cell.

[0095] In embodiment 54, the disclosure provides the plurality of gRNA molecules of embodiment 53, wherein the function of the molecule that regulates the expression of MHC II is reduced, e.g., by at least about 10%, 20%, 30%, 40% or 50%, but said function is not reduced by more than about 80%, or eliminated, and the function of the component of the T cell system is reduced, e.g., by at least about 10%, 20%, 30%, 40% or 50%, but said function is not reduced by more than about 80%, or eliminated, in the cell.

[0096] In embodiment 55, the disclosure provides the gRNA molecule or the plurality of gRNA molecules of any of embodiments 49-54, wherein when a CRISPR system (e.g., an RNP as described herein) comprising the gRNA molecule is introduced into a cell, no off-target indels are formed in said cell, e.g., as detectable by next generation sequencing and/or a nucleotide insertional assay.

[0097] In embodiment 56, the disclosure provides the gRNA molecule or the plurality of gRNA molecules of any of embodiments 49-54, wherein when a CRISPR system (e.g., an RNP as described herein) comprising the gRNA molecule is introduced into a population of cells, an off-target indel is detected in no more than about 5%, e.g., no more than about 1%, e.g., no more than about 0.1%, e.g., no more than about 0.01%, of the cells of the population of cells e.g., as detectible by next generation sequencing and/or a nucleotide insertional assay.

[0098] In embodiment 57, the disclosure provides a composition comprising the gRNA molecule or the plurality of gRNA molecules of any of embodiments 1-56.

[0099] In embodiment 58, the disclosure provides the composition of embodiment 57, further comprising a Cas molecule.

[0100] In embodiment 59, the disclosure provides the composition of embodiment 58, wherein the Cas molecule is a Cas9 molecule.

[0101] In embodiment 60, the disclosure provides the composition of embodiment 59, wherein the Cas9 molecule is a catalytically active or inactive S. pyogenes Cas9.

[0102] In embodiment 61, the disclosure provides the composition of embodiment 59, wherein the Cas9 molecule comprises any one of SEQ ID NO: 90 or SEQ ID NO: 111 to SEQ ID NO: 121 or a sequence comprising 1, 2, 3, 4, 5, 6, 7, 8, 9, or 10 amino acid modifications as compared to any one of SEQ ID NO: 90 or SEQ ID NO: 111 to SEQ ID NO: 121.

[0103] In embodiment 62, the disclosure provides the composition of any of embodiments 58-61, wherein the gRNA molecule or the plurality of gRNA molecules and the Cas9 molecule are present in a ribonuclear protein complex (RNP).

[0104] In embodiment 63, the disclosure provides the composition of any of embodiments 57-62, further comprising a template nucleic acid.

[0105] In embodiment 64, the disclosure provides the composition of embodiment 63, wherein the template nucleic acid is double-stranded or single stranded.

[0106] In embodiment 65, the disclosure provides the composition of any of embodiments 63-64, wherein the template nucleic acid is or is included in a vector.

[0107] In embodiment 66, the disclosure provides the composition of any of embodiments 63-65, wherein the template nucleic acid is or is included in a vector that is different than a vector comprising at least one gRNA molecule.

[0108] In embodiment 67, the disclosure provides the composition of any of embodiments 63-65, wherein the template nucleic acid is or is included in a vector that is the same vector that comprises at least one gRNA molecule.

[0109] In embodiment 68, the disclosure provides the composition of embodiment 65, wherein the vector is a lentivirus vector, and AAV vector, an adenovirus vector, a plasmid, a minicircle or a nanoplasmid.

[0110] In embodiment 69, the disclosure provides the composition of embodiment 68, wherein the vector is an AAV vector.

[0111] In embodiment 70, the disclosure provides the composition of any of embodiments 63-69, wherein the template nucleic acid comprises at least one (e.g., at least a 5′ or at least a 3′) homology arm, wherein the homology arm comprises sequence homologous to sequence of a molecule that regulates the expression of MHC II.

[0112] In embodiment 71, the disclosure provides the composition of embodiment 70, wherein the template nucleic acid comprises both a 5′ and a 3′ homology arm, wherein the homology arm comprises sequence homologous to sequence of a molecule that regulates the expression of MHC II.

[0113] In embodiment 72, the disclosure provides the composition of any of embodiments 63-71, wherein the template nucleic acid comprises nucleic acid encoding a chimeric antigen receptor (CAR).

[0114] In embodiment 73, the disclosure provides the composition of embodiment 72, wherein the CAR is:
[0115] (a) a CD19 CAR; or
[0116] (b) a BCMA CAR.

[0117] In embodiment 74, the disclosure provides the composition of embodiment 73, wherein the CAR is a CD19 CAR comprising an antigen binding domain comprising any one of SEQ ID NO: 160 to SEQ ID NO: 172 or SEQ ID NO: 175.

[0118] In embodiment 75, the disclosure provides the composition of any of embodiments 73-74, wherein the CAR is a CD19 CAR and comprises any one of SEQ ID NO: 185 to SEQ ID NO: 197.

[0119] In embodiment 76, the disclosure provides the composition of embodiment 73, wherein the CAR is a BCMA CAR comprising an antigen binding domain comprising any one of SEQ ID NO: 239 to SEQ ID NO: 412.

[0120] In embodiment 77, the disclosure provides the composition of any of embodiments 73 and 76, wherein the CAR is a BCMA CAR and comprises any one of SEQ ID NO: 849 to SEQ ID NO: 863 or SEQ ID NO: 879 to SEQ ID NO: 899, e.g., comprises SEQ ID NO: 859.

[0121] In embodiment 78, the disclosure provides the composition of any of embodiments 67-77, wherein the template nucleic acid comprises a promotor, e.g., an EF1-alpha promoter, operably linked to the nucleic acid sequence encoding the CAR.

[0122] In embodiment 79, the disclosure provides the composition of any of embodiments 63-78, wherein the template nucleic acid sequence is provided on an AAV vector; the template nucleic acid sequence comprises a nucleic acid sequence encoding a CAR selected from a CD19 CAR, a BCMA CAR, and a CD22 CAR; the template nucleic acid sequence further comprises at least one homology arm comprising sequence homologous to sequence of a molecule that regulates the expression of MHC II; and at least one gRNA molecule comprises a targeting domain complementary to a sequence within a genomic region (according to hg38) of chr1:151340619-151343198, chr1:151343321-151343462, chr1:151343660-151343902, chr1:151344176-151344298, chr1:151344396-151344556, chr1:151344707-151344867, chr1:151345085-151345208, chr1:151345907-151345981, chr1:151346184-151346353, chr1:151346461-151346626, chr1:151347190-151347313, chr13:36819181-36819977, chr13:36825407-36825555, chr13:36827622-36829623, and chr16:10877379-10877398.

[0123] In embodiment 80, the disclosure provides the composition of any of embodiments 63-78, wherein the template nucleic acid sequence comprises a nucleic acid sequence encoding a CAR selected from a CD19 CAR, a BCMA CAR, and a CD22 CAR; the template nucleic acid sequence further comprises at least one homology arm comprising sequence homologous to sequence of a molecule that regulates the expression of MHC II; and at least one gRNA molecule comprises a targeting domain complementary to a sequence within a genomic region (according to hg38) of chr1:151340619-151343198, chr1:151343321-151343462, chr1:151343660-151343902, chr1:151344176-151344298, chr1:151344396-151344556, chr1:151344707-151344867, chr1:151345085-151345208, chr1:151345907-151345981, chr1:151346184-151346353, chr1:151346461-151346626, chr1:151347190-151347313, chr13:36819181-36819977, chr13:36825407-36825555, chr13:36827622-36829623, and chr16:10877379-10877398.

[0124] In embodiment 81, the disclosure provides the composition of any of embodiments 63-78, wherein the template nucleic acid sequence is provided on an AAV vector; the template nucleic acid sequence further comprises at least one homology arm comprising sequence homologous to sequence of a molecule that regulates the expression of MHC II; and at least one gRNA molecule comprises a targeting domain complementary to a sequence within a genomic region (according to hg38) of chr1:151340619-151343198, chr1:151343321-151343462, chr1:151343660-151343902, chr1:151344176-151344298, chr1:151344396-151344556, chr1:151344707-151344867, chr1:151345085-151345208, chr1:151345907-151345981, chr1:151346184-151346353, chr1:151346461-151346626, chr1:151347190-151347313, chr13:36819181-36819977, chr13:36825407-36825555, chr13:36827622-36829623, and chr16:10877379-10877398.

[0125] In embodiment 82, the disclosure provides the composition of any of embodiments 63-78, wherein the template nucleic acid sequence is provided on an AAV vector; the template nucleic acid sequence comprises a nucleic acid sequence encoding a CAR selected from a CD19 CAR, a BCMA CAR, and a CD22 CAR; and at least one gRNA molecule comprises a targeting domain complementary to a sequence within a genomic region (according to hg38) of chr1:151340619-151343198, chr1:151343321-151343462, chr1:151343660-151343902, chr1:151344176-151344298, chr1:151344396-151344556, chr1:151344707-151344867, chr1:151345085-151345208, chr1:151345907-151345981, chr1:151346184-151346353, chr1:151346461-151346626, chr1:151347190-151347313, chr13:36819181-36819977, chr13:36825407-36825555, chr13:36827622-36829623, and chr16:10877379-10877398.

[0126] In embodiment 83, the disclosure provides the composition of any of embodiments 63-78, wherein the template nucleic acid sequence is provided on an AAV vector; the template nucleic acid sequence comprises a nucleic acid sequence encoding a CAR selected from a CD19 CAR, a BCMA CAR, and a CD22 CAR; the template nucleic acid sequence further comprises at least one homology arm comprising sequence homologous to sequence of a molecule that regulates the expression of MHC II; and at least one gRNA molecule comprises a targeting domain complementary to a sequence within a genomic region (according to hg38) of chr1:151340619-151343198, chr1:151343321-151343462, chr1:151343660-151343902, chr1:151344176-151344298, chr1:151344396-151344556, chr1:151344707-151344867, chr1:151345085-151345208, chr1:151345907-151345981, chr1:151346184-151346353, chr1:151346461-151346626, chr1:151347190-151347313, chr13:36819181-36819977, chr13:36825407-36825555, chr13:36827622-36829623, and chr16:10877379-10877398.

[0127] In embodiment 84, the disclosure provides the composition of any of embodiments 63-78, wherein the template nucleic acid sequence comprises a nucleic acid sequence encoding a CAR selected from a CD19 CAR, a BCMA CAR, and a CD22 CAR; and at least one gRNA molecule comprises a targeting domain complementary to a sequence within a genomic region (according to hg38) of chr1:151340619-151343198, chr1:151343321-151343462, chr1:151343660-151343902, chr1:151344176-151344298, chr1:151344396-151344556, chr1:151344707-151344867, chr1:151345085-151345208, chr1:151345907-151345981, chr1:151346184-151346353, chr1:151346461-151346626, chr1:151347190-151347313, chr13:36819181-36819977, chr13:36825407-36825555, chr13:36827622-36829623, and chr16:10877379-10877398.

[0128] In embodiment 85, the disclosure provides the composition of any of embodiments 63-78, the template nucleic acid sequence comprises at least one homology arm comprising sequence homologous to sequence of a molecule that regulates the expression of MHC II; and at least one gRNA molecule comprises a targeting domain complementary to a sequence within a genomic region (according to hg38) of chr1:151340619-151343198, chr1:151343321-151343462, chr1:151343660-151343902, chr1:151344176-151344298, chr1:151344396-151344556, chr1:151344707-151344867, chr1:151345085-151345208, chr1:151345907-151345981, chr1:151346184-151346353, chr1:151346461-151346626, chr1:151347190-151347313, chr13:36819181-36819977, chr13:36825407-36825555, chr13:36827622-36829623, and chr16:10877379-10877398.

[0129] In embodiment 86, the disclosure provides the composition of any one of embodiments 57-85, further comprising at least one additional gRNA molecule, wherein each gRNA molecule of the composition is complementary to a different target sequence.

[0130] In embodiment 87, the disclosure provides the composition of embodiment 86, further comprising at least one additional gRNA molecule, wherein each gRNA molecule of the composition is complementary to target sequences within different genes.

[0131] In embodiment 88, the disclosure provides the composition of embodiment 86, wherein at least two gRNA molecules of the composition are complementary to target sequences within the same genomic region.

[0132] In embodiment 89, the disclosure provides the composition of embodiment 87, wherein the at least one additional gRNA molecule comprises a targeting domain complementary to a target sequence of an inhibitory molecule (e.g., PDCD1).

[0133] In embodiment 90, the disclosure provides the composition of any of embodiments 57-89, formulated in a medium suitable for intracellular delivery, optionally by electroporation.

[0134] In embodiment 91, the disclosure provides the composition of any of embodiments 57-90, wherein each of said gRNA molecules is in a RNP complex with a Cas9 molecule, and optionally wherein each of said RNP complexes is at a concentration of less than about 10 uM, e.g., less than about 3 uM, e.g., less than about 1 uM, e.g., less than about 0.5 uM, e.g., less than about 0.3 uM, e.g., less than about 0.1 uM.

[0135] In embodiment 92, the disclosure provides a nucleic acid sequence that encodes at least one gRNA molecule of any of embodiments 1-56 or some or all components of a composition of any of embodiments 57-91.

[0136] In embodiment 93, the disclosure provides a vector comprising the nucleic acid of embodiment 92.

[0137] In embodiment 94, the disclosure provides the vector of embodiment 93, wherein in the vector is selected from the group consisting of a lentiviral vector, an adenoviral vector, an adeno-associated viral (AAV) vector, a herpes simplex virus (HSV) vector, a plasmid, a minicircle, a nanoplasmid, and an RNA vector.

[0138] In embodiment 95, the disclosure provides a method of altering a target sequence in a cell, comprising contacting said cell with:
[0139] (a) the gRNA molecule or the plurality of gRNA molecules of any of embodiments 1-56 and a Cas9 molecule;
[0140] (b) the gRNA molecule or the plurality of gRNA molecules of any of embodiments 1-56 and nucleic acid encoding a Cas9 molecule;
[0141] (c) nucleic acid encoding the gRNA molecule or the plurality of gRNA molecules of any of embodiments 1-56 and a Cas9 molecule;
[0142] (d) nucleic acid encoding the gRNA molecule, or the plurality of gRNA molecules of any of embodiments 1-56 and nucleic acid encoding a Cas9 molecule;
[0143] (e) any of (a) to (d), above, and a template nucleic acid, e.g., a template nucleic acid as described in any of embodiments 63-72;
[0144] (f) the composition of any of embodiments 57-91; or
[0145] (g) the vector of any of embodiments 93-94.

[0146] In embodiment 96, the disclosure provides the method of embodiment 95, wherein the gRNA molecule or the plurality of gRNA molecules of any of embodiments 1-56 or the nucleic acid encoding the gRNA molecule or the plurality of gRNA molecules of any of embodiments 1-56, and the Cas9 molecule or nucleic acid encoding the Cas9 molecule, are formulated in a single composition.

[0147] In embodiment 97, the disclosure provides the method of embodiment 95 or 96, wherein the composition comprises a template nucleic acid, e.g., a template nucleic acid as described in any of embodiments 63-72, and the template nucleic acid is formulated in a separate composition from the gRNA molecule or the plurality of gRNA molecules of any of embodiments 1-56 or nucleic acid encoding the gRNA molecule or the plurality of gRNA molecules of any of embodiments 1-56 and the Cas9 molecule or nucleic acid encoding the Cas9 molecule.

[0148] In embodiment 98, the disclosure provides the method of embodiment 97, wherein the more than one compositions are delivered sequentially.

[0149] In embodiment 99, the disclosure provides the method of any of embodiments 95-98, wherein the method results in insertion of at least a portion of the template nucleic acid at or near the target sequence of the gRNA molecule or the plurality of gRNA molecules of any of embodiments 1-56.

[0150] In embodiment 100, the disclosure provides the method of embodiment 99, wherein said insertion occurs at only at one allele.

[0151] In embodiment 101, the disclosure provides a method of engineering a cell to express a chimeric antigen receptor (CAR), comprising:
[0152] (a) introducing into said cell a CRISPR system comprising the gRNA molecule or the plurality of gRNA molecules of any of embodiments 1-56 or the composition of any of embodiments 57-91; and
[0153] (b) introducing into said cell a template nucleic acid comprising nucleic acid sequence encoding a CAR;
[0154] wherein said nucleic acid sequence encoding a CAR is integrated into the genome at or near the target sequence of said gRNA molecule.

[0155] In embodiment 102, the disclosure provides the method of embodiment 101, further comprising introducing into said cell one or more CRISPR systems comprising one or more gRNA molecules complementary to a target sequence of an inhibitory molecule.

[0156] In embodiment 103, the disclosure provides the method of any of embodiments 95-102, wherein the cell is an animal cell.

[0157] In embodiment 104, the disclosure provides the method of any of embodiments 95-103, wherein the cell is a mammalian, primate, or human cell.

[0158] In embodiment 105, the disclosure provides the method of embodiment 104, wherein the cell is an immune effector cell (e.g., a population of immune effector cells).

[0159] In embodiment 106, the disclosure provides the method of embodiment 105, wherein the immune effector cell is a T cell or NK cell, e.g., a T cell, e.g., a CD4+ T cell, a CD8+ T cell, or a combination thereof.

[0160] In embodiment 107, the disclosure provides the method of any of embodiments 101-102, wherein the CAR is:
[0161] (a) a CD19 CAR, e.g., as described in herein; or
[0162] (b) a BCMA CAR, e.g., as described herein.

[0163] In embodiment 108, the disclosure provides the method of embodiment 107, wherein the CAR is a CD19 CAR comprising an antigen binding domain comprising any one of SEQ ID NO: 160 to SEQ ID NO: 172 or SEQ ID NO: 175.

[0164] In embodiment 109, the disclosure provides the method of any of embodiments 107-108, wherein the CAR is a CD19 CAR and comprises any one of SEQ ID NO: 185 to SEQ ID NO: 197.

[0165] In embodiment 110, the disclosure provides the method of embodiment 107, wherein the CAR is a BCMA CAR comprising an antigen binding domain comprising any one of SEQ ID NO: 239 to SEQ ID NO: 412.

[0166] In embodiment 111, the disclosure provides the method of any of embodiments 107 and 110, wherein the CAR is a BCMA CAR and comprises any one of SEQ ID NO: 849 to SEQ ID NO: 863 or SEQ ID NO: 879 to SEQ ID NO: 899, e.g., comprises SEQ ID NO: 859.

[0167] In embodiment 112, the disclosure provides the method of any of embodiments 95-111, wherein the cell is autologous or allogeneic with respect to a patient to be administered said cell.

[0168] In embodiment 113, the disclosure provides a cell, altered by the method of any of embodiments 95-112.

[0169] In embodiment 114, the disclosure provides a cell, comprising the gRNA molecule or the plurality of gRNA molecules of any of embodiments 1-56, or the composition of any of embodiments 57-91, the nucleic acid of embodiment 92, or the vector of any of embodiments 93-94.

[0170] In embodiment 115, the disclosure provides the cell of any of embodiments 113-114, wherein the cell is an animal cell, optionally a mammalian, primate, or human cell.

[0171] In embodiment 116, the disclosure provides the cell of embodiment 115, wherein the cell is an immune effector cell or a population of immune effector cells), optionally a T cell or NK cell, optionally a T cell, optionally a CD4+ T cell, a CD8+ T cell, or a combination thereof.

[0172] In embodiment 117, the disclosure provides the cell of any of embodiments 113-116, wherein the cell has reduced or eliminated expression of an inhibitory molecule, a component of the T cell receptor (e.g., TRAC, TRBC1, TRBC2, CD3E, CD3D, or CD3G), B2M, CIITA, or combinations thereof, e.g., relative to an unmodified cell of the same type.

[0173] In embodiment 118, the disclosure provides the cell of any of embodiments 113-117, wherein the cell comprises nucleic acid sequence encoding a chimeric antigen receptor (CAR) integrated into the genome at chr1:151340619-151343198, chr1:151343321-151343462, chr1:151343660-151343902, chr1:151344176-151344298, chr1:151344396-151344556, chr1:151344707-151344867, chr1:151345085-151345208, chr1:151345907-151345981, chr1:151346184-151346353, chr1:151346461-151346626, chr1:151347190-151347313, chr13:36819181-36819977, chr13:36825407-36825555, chr13:36827622-36829623, and chr16:10877379-10877398.

[0174] In embodiment 119, the disclosure provides the cell of any of embodiments 13-118, wherein the cell comprises reduced or eliminated expression and/or reduced or eliminated function of a molecule that regulates the expression of MHC II relative to the level of expression and/or function of an unaltered cell of the same cell type.

[0175] In embodiment 120, the disclosure provides the cell of any of embodiments 113-119, wherein the cell is a T cell and exhibits:
[0176] (a) enhanced proliferative capacity;
[0177] (b) enhanced cytotoxicity;
[0178] (c) a less-exhausted phenotype (e.g., reduced expression of an inhibitory molecule, e.g., PD1, TIM3, LAG3, PD-L1, or combinations thereof); and/or
[0179] (d) a Tscm phenotype (e.g., is CD45RA+CD62L+CD27+CD95+),
[0180] relative to an unaltered cell of similar type.

[0181] In embodiment 121, the disclosure provides the cell of any of embodiments 113-120, wherein the cell is autologous with respect to a patient to be administered said cell.

[0182] In embodiment 122, the disclosure provides the cell of any of embodiments 113-120, wherein the cell is allogeneic with respect to a patient to be administered said cell.

[0183] In embodiment 123, the disclosure provides a modified cell which has reduced or eliminated expression and/or function of at least one molecule that regulates the expression of MHC II relative to an unmodified cell of the same type, and comprises heterologous nucleic acid sequence (e.g., nucleic acid sequence encoding a chimeric antigen receptor) integrated at a site within a genomic region of the molecule that regulates the expression of MHC II, wherein the site within the genomic region is selected from anyone of: chr1:151340619-151343198, chr1:151343321-151343462, chr1:151343660-151343902, chr1:151344176-151344298, chr1:151344396-151344556, chr1:151344707-151344867, chr1:151345085-151345208, chr1:151345907-151345981, chr1:151346184-151346353, chr1:151346461-151346626, chr1:151347190-151347313, chr13:36819181-36819977, chr13:36825407-36825555, chr13:36827622-36829623, and chr16:10877379-10877398, wherein the genomic region is according to human reference genome hg38.

[0184] In embodiment 124, the disclosure provides a modified cell which has reduced or eliminated expression and/or function of at least one molecule that regulates the expression of MHC II relative to an unmodified cell of the same type, optionally selected from HLA-DM, HLA-DO, HLA-DR, HLA-DQ, HLA-DP, CIITA, RFXANK, RFXAP, RFX1, RFX5, NF-YA, NF-YB, NF-YC, X2BP, and OCAB, and at least one component of the T cell system, optionally selected from TRAC, TRBC1, TRBC2, CD247, CD3, CD3D, CD3E, CD3G, DCK, CD52, FKBP1A, and NR3C1.

[0185] In embodiment 125, the disclosure provides the modified cell of embodiment 124, further comprising a heterologous nucleic acid sequence (e.g., nucleic acid sequence encoding a chimeric antigen receptor) integrated at a site within a genomic region of the molecule that regulates the expression of MHC II, wherein the site within the genomic region is selected from any one of: chr1:151340619-151343198, chr1:151343321-151343462, chr1:151343660-151343902, chr1:151344176-151344298, chr1:151344396-151344556, chr1:151344707-151344867, chr1:151345085-151345208, chr1:151345907-151345981, chr1:151346184-151346353, chr1:151346461-151346626, chr1:151347190-151347313, chr13:36819181-36819977, chr13:36825407-36825555, chr13:36827622-36829623, and chr16:10877379-10877398, wherein the genomic region is according to human reference genome hg38.

[0186] In embodiment 126, the disclosure provides a modified cell which has reduced or eliminated expression and/or function of at least one molecule that regulates the expression of MHC II relative to an unmodified cell of the same type, optionally selected from HLA-DM, HLA-DO, HLA-DR, HLA-DQ, HLA-DP, CIITA, RFXANK, RFXAP, RFX1, RFX5, NF-YA, NF-YB, NF-YC, X2BP, and OCAB; at least one component of the T cell system, optionally selected from TRAC, TRBC1, TRBC2, CD247, CD3, CD3D, CD3E, CD3G, DCK, CD52, FKBP1A, and NR3C1; and at least one molecule that regulates the expression of MHC I, optionally selected from HLA-A, HLA-B, HLA-C, B2M, and NLRC5.

[0187] In embodiment 127, the disclosure provides the modified cell of embodiment 126, further comprising a heterologous nucleic acid sequence (e.g., nucleic acid sequence encoding a chimeric antigen receptor) integrated at a site within a genomic region of the molecule that regulates the expression of MHC II, wherein the site within the genomic region is selected from any one of: chr1:151340619-151343198, chr1:151343321-151343462, chr1:151343660-151343902, chr1:151344176-151344298, chr1:151344396-151344556, chr1:151344707-151344867, chr1:151345085-151345208, chr1:151345907-151345981, chr1:151346184-151346353, chr1:151346461-151346626, chr1:151347190-151347313, chr13:36819181-36819977, chr13:36825407-36825555, chr13:36827622-36829623, and chr16:10877379-10877398, wherein the genomic region is according to human reference genome hg38.

[0188] In embodiment 128, the disclosure provides the cell of any of embodiments 124 or 125, wherein the cell has (a) reduced or eliminated expression and/or function of at least one component of the T cell system and/or (b) reduced or eliminated expression and/or function of at least one molecule that regulates the expression of MHC I relative to an unmodified cell of the same type.

[0189] In embodiment 129, the disclosure provides the cell of any one of embodiments 123-128, wherein the cell has reduced or eliminated expression and/or function of at least one of CIITA, RFXAP, or RFX5.

[0190] In embodiment 130, the disclosure provides the cell of any one of embodiments 123-129, wherein the cell is an animal cell.

[0191] In embodiment 131, the disclosure provides the cell of embodiment 130, wherein the cell is a mammalian, primate, or human cell.

[0192] In embodiment 132, the disclosure provides the cell of any of embodiments 123-131, wherein the cell is an immune effector cell (e.g., a population of immune effector cells).

[0193] In embodiment 133, the disclosure provides the cell of embodiment 132, wherein the immune effector cell is a T cell or NK cell, e.g., a T cell, e.g., a CD4+ T cell, a CD8+ T cell, or a combination thereof.

[0194] In embodiment 134, the disclosure provides the cell of any of embodiments 123-133, wherein the cell expresses a chimeric antigen receptor (CAR).

[0195] In embodiment 135, the disclosure provides the cell of embodiment 134, wherein the CAR is a CD19 CAR or a BCMA CAR.

[0196] In embodiment 136, the disclosure provides the cell of embodiment 135, wherein the CAR is a CD19 CAR comprising an antigen binding domain comprising any one of SEQ ID NO: 160 to SEQ ID NO: 172 or SEQ ID NO: 175.

[0197] In embodiment 137, the disclosure provides the cell of embodiment 135 or 136, wherein the CAR is a CD19 CAR and comprises any one of SEQ ID NO: 185 to SEQ ID NO: 197.

[0198] In embodiment 138, the disclosure provides the cell of embodiment 135, wherein the CAR is a BCMA CAR comprising an antigen binding domain comprising any one of SEQ ID NO: 239 to SEQ ID NO: 412.

[0199] In embodiment 139, the disclosure provides the cell of any of embodiments 135-138, wherein the CAR is a BCMA CAR and comprises any one of SEQ ID NO: 849 to SEQ ID NO: 863 or SEQ ID NO: 879 to SEQ ID NO: 899, e.g., comprises SEQ ID NO: 859.

[0200] In embodiment 140, the disclosure provides the cell of any of embodiments 123-139, wherein the cell is autologous or allogeneic with respect to a patient to be administered said cell.

[0201] In embodiment 141, the disclosure provides a method of providing an anti-tumor immunity in a subject, the method comprising administering to the subject an effective amount of a cell of any of embodiments 113-140.

[0202] In embodiment 142, the disclosure provides a method of treating a subject having a disease associated with expression of a tumor antigen, optionally a proliferative disease, a precancerous condition, a cancer, or a non-cancer related indication associated with expression of the tumor antigen, the method comprising administering to the subject an effective amount of a cell of any of embodiments 113-140.

[0203] In embodiment 143, the disclosure provides the method of embodiment 142, wherein the disease associated with expression of a tumor antigen is cancer or a non-cancer related indication.

[0204] In embodiment 144, the disclosure provides the method of embodiment 143, wherein the disease is cancer selected from colon cancer, rectal cancer, renal-cell carcinoma, liver cancer, non-small cell carcinoma of the lung, cancer of the small intestine, cancer of the esophagus, melanoma, bone cancer, pancreatic cancer, skin cancer, cancer of the head or neck, cutaneous or intraocular malignant melanoma, uterine cancer, ovarian cancer, rectal cancer, cancer of the anal region, stomach cancer, testicular cancer, carcinoma of the fallopian tubes, carcinoma of the endometrium, carcinoma of the cervix, carcinoma of the vagina, carcinoma of the vulva, Hodgkin's Disease, non-Hodgkin's lymphoma, cancer of the endocrine system, cancer of the thyroid gland, cancer of the parathyroid gland, cancer of the adrenal gland, sarcoma of soft tissue, cancer of the urethra, cancer of the penis, solid tumors of childhood, cancer of the bladder, cancer of the kidney or ureter, carcinoma of the renal pelvis, neoplasm of the central nervous system (CNS), primary CNS lymphoma, tumor angiogenesis, spinal axis tumor, brain stem glioma, pituitary adenoma, Kaposi's sarcoma, epidermoid cancer, squamous cell cancer, T-cell lymphoma, environmentally induced cancers, chronic lymphocytic leukemia (CLL), acute leukemias, acute lymphoid leukemia (ALL), B-cell acute lymphoid leukemia (B-ALL), T-cell acute lymphoid leukemia (T-ALL), chronic myelogenous leukemia (CML), acute myeloid leukemia (AML), B cell prolymphocytic leukemia, blastic plasmacytoid dendritic cell neoplasm, Burkitt's lymphoma, diffuse large B cell lymphoma, follicular lymphoma, hairy cell leukemia, small cell- or a large cell-follicular lymphoma, malignant lymphoproliferative conditions, MALT lymphoma, mantle cell lymphoma, marginal zone lymphoma, multiple myeloma, myelodysplasia and myelodysplastic syndrome, Hodgkin's lymphoma, plasmablastic lymphoma, plasmacytoid dendritic cell neoplasm, Waldenstrom macroglobulinemia, and pre-leukemia, combinations of said cancers, and metastatic lesions of said cancers.

[0205] In embodiment 145, the disclosure provides the method of embodiment 144, wherein the cancer is acute lymphoid leukemia (ALL).

[0206] In embodiment 146, the disclosure provides the method of embodiment 144, wherein the cancer is pediatric ALL.

[0207] In embodiment 147, the disclosure provides the method of embodiment 144, wherein the cancer is diffuse large B cell lymphoma.

[0208] In embodiment 148, the disclosure provides the method of embodiment 144, wherein the cancer is chronic lymphocytic leukemia.

[0209] In embodiment 149, the disclosure provides the method of embodiment 144, wherein the cancer is follicular lymphoma.

[0210] In embodiment 150, the disclosure provides the method of embodiment 144, wherein the cancer is Hodgkin lymphoma.

[0211] In embodiment 151, the disclosure provides the method of embodiment 144, wherein the cancer is non-Hodgkin lymphoma.

[0212] In embodiment 152, the disclosure provides the method of any of embodiments 141-151, wherein the method further comprises administering a chemotherapeutic agent.

[0213] In embodiment 153, the disclosure provides the method of embodiment 152, wherein the chemotherapeutic agent is cyclophosphamide, fludarabine, or cyclophosphamide and fludarabine.

[0214] In embodiment 154, the disclosure provides the method of any of embodiments 141-153, wherein the method comprises administering a lymphodepleting agent or immunosuppressant prior to administering to the subject an effective amount of the cell of any of embodiments 113-140.

[0215] In embodiment 155, the disclosure provides a population of cells comprising the cell of any of embodiments 113-140, wherein at least about 30% of the cells, or at least about 40%, 50%, 60%, 70,%, 80% or 90% of the cells, are a cell according to any of embodiments 113-140.

[0216] In embodiment 156, the disclosure provides a gene editing system which binds a plurality of sequences selected from:
[0217] (a) at least one molecule that regulates the expression of MHC II, optionally selected from HLA-DM, HLA-DO, HLA-DR, HLA-DQ, HLA-DP, CIITA, RFXANK, RFXAP, RFX1, RFX5, NF-YA, NF-YB, NF-YC, X2BP, and OCAB; and
[0218] (c) at least one component of the T cell system, optionally selected from TRAC, TRBC1, TRBC2, CD247, CD3, CD3D, CD3E, CD3G, DCK, CD52, FKBP1A, and NR3C1.

[0219] In embodiment 157, the disclosure provides the gene editing system of embodiment 156, wherein the sequence of the molecule that regulates the expression of MHC II is a sequence within a genomic region selected from chr1:151340619-151343198, chr1:151343321-151343462, chr1:151343660-151343902, chr1:151344176-151344298, chr1:151344396-151344556, chr1:151344707-151344867, chr1:151345085-151345208, chr1:151345907-151345981, chr1:151346184-151346353, chr1:151346461-151346626, chr1:151347190-151347313, chr13:36819181-36819977, chr13:36825407-36825555, chr13:36827622-36829623, and chr16:10877379-10877398, wherein the genomic region is according to hg38.

[0220] In embodiment 158, the disclosure provides the gene editing system of embodiment 157, wherein the genomic region is chr1:151346191-151346216, chr13:36819493-36819518, chr13:36819686-36819711, chr13:36819687-36819712, chr13:36819688-36819713, chr13:36819809-36819834, and chr13:36819343-36819368.

[0221] In embodiment 159, the disclosure provides the gene editing system of any of embodiments 156-158, wherein the gene editing system is a zinc finger nuclease (ZFN) gene editing system, a TALEN gene editing system, a CRISPR gene editing system, or a meganuclease gene editing system.

[0222] In embodiment 160, the disclosure provides the gene editing system of any of embodiments 156-159, wherein the gene editing system further comprises a template nucleic acid.

[0223] In embodiment 161, the disclosure provides the gene editing system of embodiment 160, wherein the template nucleic acid comprises nucleic acid sequence encoding a CAR.

[0224] In embodiment 162, the disclosure provides the gene editing system of embodiment 161, wherein when said gene editing system (and/or nucleic acid sequence encoding one or more components of the gene editing system) is introduced into a cell, the nucleic acid sequence encoding the CAR is integrated into the genome of said cell at or near the sequence of HLA-DM, HLA-DO, HLA-DR, HLA-DQ, HLA-DP, CIITA, RFXANK, RFXAP, RFX1, RFX5, NF-YA, NF-YB, NF-YC, X2BP, OCAB, HLA-A, HLA-B, HLA-C, B2M, NLRC5, TRAC, TRBC1, TRBC2, CD247, CD3, CD3D, CD3E, CD3G, DCK, CD52, FKBP1A, and/or or NR3C1 bound by said genome editing system.

[0225] In embodiment 163, the disclosure provides a cell modified by the gene editing system of any of embodiments 156-162.

[0226] In embodiment 164, the disclosure provides a cell comprising the gene editing system of any of embodiments 156-162.

[0227] In embodiment 165, the disclosure provides the gRNA molecule or the plurality of gRNA molecules of any of embodiments 1-56, a composition of any of embodiments 57-91, a nucleic acid of embodiment 92, a vector of any of embodiments 93-94, a cell (or population of cells) of any of embodiments 113-140 or 155, or a gene editing system of any of embodiments 156-162, for use as a medicament.

[0228] In embodiment 166, the disclosure provides a gRNA molecule or the plurality of gRNA molecules of any of embodiments 1-56, a composition of any of embodiments 57-91, a nucleic acid of embodiment 92, a vector of any of embodiments 93-94, a cell (or population of cells) of any of embodiments 113-140 or 155, or a gene editing system of any of embodiments 156-162, for use in the manufacture of a medicament.

[0229] In embodiment 167, the disclosure provides a gRNA molecule or the plurality of gRNA molecules of any of embodiments 1-56, a composition of any of embodiments 57-91, a nucleic acid of embodiment 92, a vector of any of embodiments 93-94, a cell (or population of cells) of any of embodiments 113-140 or 155, or a gene editing system of any of embodiments 156-162, for use in the treatment of a disease.

[0230] In embodiment 168, the disclosure provides a gRNA molecule or the plurality of gRNA molecules of any of embodiments 1-56, a composition of any of embodiments 57-91, a nucleic acid of embodiment 92, a vector of any of embodiments 93-94, a cell (or population of cells) of any of embodiments 113-140 or 155, or a gene editing system of any of embodiments 156-162, for use in treating a disease associated with expression of a tumor antigen, optionally a proliferative disease, a precancerous condition, a cancer, or a non-cancer related indication associated with expression of the tumor antigen, by administering the gRNA molecule, composition, nucleic acid, vector, cell, population of cells, or gene editing system to a patient having the disease.

[0231] In embodiment 169, the disclosure provides a gRNA molecule or the plurality of gRNA molecules of any of embodiments 1-56, a composition of any of embodiments 57-91, a nucleic acid of embodiment 92, a vector of any of embodiments 93-94, a cell (or population of cells) of any of embodiments 113-140 or 155, or a gene editing system of any of embodiments 156-162, for use in the treatment of a cancer, wherein the cancer is a hematologic cancer selected from the group consisting of chronic lymphocytic leukemia (CLL), acute leukemias, acute lymphoid leukemia (ALL), B-cell acute lymphoid leukemia (B-ALL), T-cell acute lymphoid leukemia (T-ALL), chronic myelogenous leukemia (CML), acute myeloid leukemia (AML), B cell prolymphocytic leukemia, blastic plasmacytoid dendritic cell neoplasm, Burkitt's lymphoma, diffuse large B cell lymphoma, follicular lymphoma, hairy cell leukemia, small cell- or a large cell-follicular lymphoma, malignant lymphoproliferative conditions, MALT lymphoma, mantle cell lymphoma, marginal zone lymphoma, multiple myeloma, myelodysplasia and myelodysplastic syndrome, non-Hodgkin's lymphoma, Hodgkin's lymphoma, plasmablastic lymphoma, plasmacytoid dendritic cell neoplasm, Waldenstrom macroglobulinemia, and pre-leukemia, by administering the gRNA molecule, composition, nucleic acid, vector, cell, population of cells, or gene editing system to a patient having the cancer.

[0232] In embodiment 170, the disclosure provides the gRNA molecule, plurality of gRNA molecules, composition, nucleic acid, vector, cell or population of cells, or gene editing system for us of embodiment 169, wherein the cancer is acute lymphoid leukemia (ALL).

[0233] In embodiment 171, the disclosure provides the gRNA molecule, plurality of gRNA molecules, composition, nucleic acid, vector, cell or population of cells, or gene editing system for us of embodiment 169, wherein the cancer is pediatric ALL.

[0234] In embodiment 172, the disclosure provides the gRNA molecule, plurality of gRNA molecules, composition, nucleic acid, vector, cell or population of cells, or gene editing system for us of embodiment 169, wherein the cancer is diffuse large B cell lymphoma.

[0235] In embodiment 173, the disclosure provides the gRNA molecule, plurality of gRNA molecules, composition, nucleic acid, vector, cell or population of cells, or gene editing system for us of embodiment 169, wherein the cancer is chronic lymphocytic leukemia.

[0236] In embodiment 174, the disclosure provides the gRNA molecule, plurality of gRNA molecules, composition, nucleic acid, vector, cell or population of cells, or gene editing system for us of embodiment 169, wherein the cancer is follicular lymphoma.

[0237] In embodiment 175, the disclosure provides the gRNA molecule, plurality of gRNA molecules, composition, nucleic acid, vector, cell or population of cells, or gene editing system for us of embodiment 169, wherein the cancer is Hodgkin lymphoma.

[0238] In embodiment 176, the disclosure provides the gRNA molecule, plurality of gRNA molecules, composition, nucleic acid, vector, cell or population of cells, or gene editing system for us of embodiment 169, wherein the cancer is non-Hodgkin lymphoma.

[0239] In embodiment 177, the disclosure provides a gRNA molecule or the plurality of gRNA molecules of any of embodiments 1-56, a composition of any of embodiments 57-91, a nucleic acid of embodiment 92, a vector of any of embodiments 93-94, a cell (or population of cells) of any of embodiments 113-140 or 155, or a gene editing system of any of embodiments 156-162, for use in the treatment of a cancer, optionally wherein the cancer is selected from the group consisting of mesothelioma, adenocarcinoma, glioblastoma, colon cancer, rectal cancer, renal-cell carcinoma, liver cancer, non-small cell carcinoma of the lung, cancer of the small intestine, cancer of the esophagus, melanoma, bone cancer, pancreatic cancer, skin cancer, cancer of the head or neck, cutaneous or intraocular malignant melanoma, uterine cancer, ovarian cancer, rectal cancer, cancer of the anal region, stomach cancer, testicular cancer, carcinoma of the fallopian tubes, carcinoma of the endometrium, carcinoma of the cervix, carcinoma of the vagina, carcinoma of the vulva, Hodgkin's Disease, non-Hodgkin's lymphoma, cancer of the endocrine system, cancer of the thyroid gland, cancer of the parathyroid gland, cancer of the adrenal gland, sarcoma of soft tissue, cancer of the urethra, cancer of the penis, solid tumors of childhood, cancer of the bladder, cancer of the kidney or ureter, carcinoma of the renal pelvis, neoplasm of the central nervous system (CNS), primary CNS lymphoma, tumor angiogenesis, spinal axis tumor, brain stem glioma, pituitary adenoma, Kaposi's sarcoma, epidermoid cancer, squamous cell cancer, T-cell lymphoma, environmentally induced cancers, combinations of said cancers, and metastatic lesions of said cancers, by administering the gRNA molecule, composition, nucleic acid, vector, cell, population of cells, or gene editing system to a patient having the cancer.

### BRIEF DESCRIPTION OF THE DRAWINGS

[0240] FIGS. 1A-D show HLA-DR expression levels. FIG. 1A shows HLA-DR expression on different days after 3:1 beads activation. At day 7, there is a significant and high intensity HLA-DR positive population compared to day 3 by FACS. FIG. 1B shows CRISPR knockout of MHC-II on Day 3 after activation and FACS on Day 6 after electroporation. T cells show high HLA-DR expression on day 6 after electroporation, and CRISPR treated cells show significantly decreased HLA-DR expression that is equal to or lower than that of 3 day activated T cells at the same time point. FIG. 1c shows four exemplary gRNA targets on RFXAP tested in T cells with various final RNP concentrations. In 3 day activated T cells, HLA-DR expression level was comparable to basal levels in a negative population. gRNA P3 can reduce activated T cell HLA-DR positive cells to basal levels with 0.4125 uM. FIG. 1D shows that MFI of HLA-DR positive population demonstrated that gRNA P3 at 0.4125 uM can decrease cells MFI of HLA-DR expression level to the basal level.

[0241] FIGS. 2A-B show HLA-DR expression percentage and expression intensity after RFXAP and RFX5 MHC-II CRISPR knock-out. FIG. 2A shows that gRNA X5 and P3 can both decrease HLA-DR positive cells efficiently, and P3 showed less than 20% HLA-DR positive cells at 0.4125 uM. FIG. 2B shows that HLA-DR expression intensity using P3 at 0.4125 uM can reduced HLA-DR intensity to basal levels.

[0242] FIGS. 3A-B show HLA-DR expression (%) and expression intensity after two exemplary molecules that regulate MHC II expression, RFXAP and CIITA, are knocked out using CRISPR. FIG. 3A shows RFXAP gRNA P3 can remove HLA-DR positive cell efficiently at 0.1 uM. FIG. 3B shows RFXAP gRNA P3 offers efficient knock-out and decreases HLA-DR expression intensity at 0.103 uM.

[0243] FIGS. 4A-B show CRISPR gene edited triple knockout T cells. FIG. 4A shows T cells with multiplexing gene editing by gRNA 961 for TCR, gRNA 444 for B2M, and gRNA P3 for RFXAP (detected by HLA-DR). The results showed >90% KO of CD3 and MHC-I and 86% KO for MHC-II. FIG. 4B show T cells with multiplexing gene editing by gRNA 961 for TCR, gRNA 444 for B2M, and gRNA 3007 for CIITA (detected by HLA-DR). The results showed >90% for CD3 KO 88% for B2M KO, and 88% for HLA-DR KO. Overall these two multiplexing combinations can efficiently provide triple knockouts.

[0244] FIGS. 5A-E show enhanced reduction of MHC-II expression by combining CRISPR systems targeting CIITA and RFXAP or RFX5. FIG. 5A shows 6 days after electroporation, activated T cells with HLA-DR expression level are up to 64%. FIG. 5B shows targeting CIITA by 0.8M of 3007 RNP resulted in 18% HLA-DR positive cell. FIG. 5C shows targeting CIITA by 1.6 uM of 3007 RNP resulted in 18% HLA-DR positive cell. However, by using combined RNP as shown in FIG. 5D (CIITA with RFXAP at 0.8 uM of each RNP final concentration) and FIG. 5E (CIITA with RFX5 at 0.8 uM of each RNP final concentration), HLA-DR can be decreased in remaining cells from 18% to about 3-5%.

### DEFINITIONS

[0245] The terms “gene editing system” or “genome editing system” refer to a system of one or more molecules comprising at least a nuclease (or nuclease domain) and a programmable nucleotide binding domain, which are necessary and sufficient to direct and effect modification (e.g., single or double-strand break) of nucleic acid at a target sequence by the nuclease (or nuclease domain). In embodiments, the gene editing system is a CRISPR system. In embodiments, the gene editing system is a zinc finger nuclease (ZFN) system. In embodiments, the gene editing system is a TALEN system. In embodiments, the gene editing system is a meganuclease system. In embodiments, the gene editing system modifies at least two targets, a first target, i.e., a molecule that regulates the expression of MHC II (e.g., HLA-DM, HLA-DO, HLA-DR, HLA-DQ, HLA-DP, CIITA, RFXANK, RFXAP, RFX1, RFX5, NF-YA, NF-YB, NF-YC, X2BP, or OCAB), and a second target, i.e., a component of the T cell system (e.g., TRAC, TRBC1, TRBC2, CD247, CD3, CD3D, CD3E, CD3G, DCK, CD52, FKBP1A, or NR3C1). In some embodiments, the gene editing system further modifies a third target, i.e., a molecule that regulates the expression of MHC I (e.g. HLA-A, HLA-B, HLA-C, B2M, or NLRC5). In embodiments, the gene editing system further comprises a template nucleic acid, e.g., a template nucleic acid comprising sequence encoding a chimeric antigen receptor, e.g., as described herein. In embodiments, one or more of the components of the gene editing system may be introduced into cells as nucleic acid encoding said component or components. Without being bound by theory, upon expression of said component or component, the gene editing system is constituted, e.g., in the cell.

[0246] The terms “CRISPR system,” “Cas system” or “CRISPR/Cas system” refer to a set of molecules comprising an RNA-guided nuclease or other effector molecule and a guide RNA molecule that together are necessary and sufficient to direct and effect modification of nucleic acid at a target sequence by the RNA-guided nuclease or other effector molecule. In one embodiment, a CRISPR system comprises a guide RNA molecule and a Cas protein, e.g., a Cas9 protein. Such systems comprising a Cas9 or modified Cas9 molecule are referred to herein as “Cas9 systems” or “CRISPR/Cas9 systems.” In one example, the guide RNA molecule and Cas molecule may be complexed, to form a ribonuclear protein (RNP) complex.

[0247] The terms “guide RNA,” “guide RNA molecule,” “gRNA molecule” or “gRNA” are used interchangeably, and refer to a set of nucleic acid molecules that promote the specific directing of an RNA-guided nuclease or other effector molecule (typically in complex with the gRNA molecule) to a target sequence. A gRNA molecule may have a number of domains, as described more fully below. In some embodiments, a gRNA molecule comprises a targeting domain and interacts with a Cas molecule, such as Cas9 or or with another RNA-guided endonuclease such as Cpf1. In some embodiments, a gRNA molecule comprises a crRNA domain (comprising a targeting domain) and a tracr, e.g., for interacting with a Cas molecule such as Cas9. In some embodiments, directing of nuclease binding is accomplished through hybridization of a portion of the gRNA to DNA (e.g., through the gRNA targeting domain), and by binding of a portion of the gRNA molecule to the RNA-guided nuclease or other effector molecule (e.g., through at least the gRNA tracr). In embodiments, the crRNA and the tracr are provided on a single contiguous polynucleotide molecule, referred to herein as a “single guide RNA,” “sgRNA,” or “single-molecule DNA-targeting RNA” and the like. In other embodiments, the crRNA and tracr are provided on separate polynucleotide molecules, which are themselves capable of association, usually through hybridization, referred to herein as a “dual guide RNA,” “dgRNA,” or “double-molecule DNA-targeting RNA” and the like. In some embodiments of dgRNAs, the crRNA and tracr are linked by a nonnucleotide chemical linker.

[0248] The term “targeting domain” as used herein in connection with a gRNA, is the portion of the gRNA molecule that recognizes, e.g., is complementary to, a target sequence, e.g., a target sequence within the nucleic acid of a cell, e.g., within a gene.

[0249] The term “crRNA” as used herein in connection with a gRNA molecule, is a portion of the gRNA molecule that comprises a targeting domain. In embodiments, the crRNA comprises a region that interacts with a tracr to form a flagpole region. In some embodiments, a crRNA can interact directly with an RNA-guided endonuclease, such as a Cas protein (e.g. Cpf1), without a tracr RNA.

[0250] The term “target sequence” refers to a sequence of nucleic acids complementary, e.g., fully complementary, to a gRNA targeting domain. In embodiments, the target sequence is disposed on genomic DNA. In an embodiment, the target sequence is adjacent to (either on the same strand or on the complementary strand of DNA) a protospacer adjacent motif (PAM) sequence recognized by a protein having nuclease or other effector activity, e.g., a PAM sequence recognized by Cas9. The PAM sequence and length may depend on the Cas9 protein used. Non-limiting examples of PAM sequences include 5′-NGG-3′, 5′-NGGNG-3′, 5′-NG-3′, 5′-NAAAAN-3′, 5′-NNAAAAW-3′, 5′-NNNNACA-3′, 5′-GNNNCNNA-3′, and 5′-NNNNGATT-3′ where N represents any nucleotide, and W represents A or T.

[0251] In embodiments, the target sequence is a target sequence of an allogeneic T cell target. In embodiments, the target sequence is a target sequence of an inhibitory molecule. In embodiments, the target sequence is a target sequence of a downstream effector of an inhibitory molecule.

[0252] The term “flagpole” as used herein in connection with a gRNA molecule, refers to the portion of the gRNA where the crRNA and the tracr bind to, or hybridize to, one another.

[0253] The term “tracr” or “tracrRNA” as used herein in connection with a gRNA molecule refers to the portion of the gRNA that binds to a nuclease or other effector molecule. In embodiments, the tracr comprises nucleic acid sequence that binds specifically to Cas9. In embodiments, the tracr comprises nucleic acid sequence that forms part of the flagpole.

[0254] The term “Cas” refers to an RNA-guided nuclease of the CRISPR system that together with a guide RNA molecule are necessary and sufficient to direct and effect modification of nucleic acid at a target sequence. One non-limiting example is a Cas molecule from the Type II CRISPR system, e.g., a Cas9 molecule. Another non-limiting example is a Cas molecule is from a Type V CRISPR system, e.g., a Cpf1 molecule.

[0255] The terms “Cas9” and “Cas9 molecule” refer to an enzyme from a bacterial Type II CRISPR/Cas system responsible for DNA cleavage. In embodiments, Cas9 also includes wild-type protein, mutant protein, variant protein, including non-catalytic protein, and functional fragments thereof. Non-limiting examples of Cas9 sequences are known in the art and provided herein. In some embodiments, Cas9 refers to a Cas9 sequence that comprises at least about 60%, 65%, 70%, 75%, 80%, 85%, 90%, 95%, 96%, 97%, 98%, or 99% homology with; differs at no more than 1%, 2%, 5%, 10%, 15%, 20%, 30%, or 40% of the amino acid residues when compared with; differs by at least 1, 2, 5, 10 or 20 amino acids but by no more than 100, 80, 70, 60, 50, 40 or 30 amino acids from; or is identical to any Cas9 sequence, e.g., wild-type, mutant, variant, non-catalytic, or functional fragment thereof, known in the art or disclosed herein.

[0256] The terms “Cpf1” and “Cpf1 molecule” refer to an enzyme from a bacterial Type V CRISPR/Cas system responsible for DNA cleavage. In embodiments, Cpf1 also includes wild-type protein, mutant protein, variant protein, including non-catalytic protein, and functional fragments thereof. Non-limiting examples of Cpf1 sequences are known in the art. In some embodiments, Cpf1 refers to a Cpf1 sequence that comprises at least about 60%, 65%, 70%, 75%, 80%, 85%, 90%, 95%, 96%, 97%, 98%, or 99% homology with; differs at no more than 1%, 2%, 5%, 10%, 15%, 20%, 30%, or 40% of the amino acid residues when compared with; differs by at least 1, 2, 5, 10 or 20 amino acids but by no more than 100, 80, 70, 60, 50, 40 or 30 amino acids from; or is identical to any Cpf1 sequence, e.g., wild-type, mutant, variant, non-catalytic, or functional fragment thereof, known in the art. Unlike other Cas proteins (e.g. Cas9) Cpf1 does not require tracrRNA for activity and is capable of binding and cleaving genomic target sequences with only a crRNA polynucleotide. Therefore, in some embodiments that utilize Cpf1 to edit target sequences, the gRNA may lack a tracrRNA moiety. The term “complementary” as used in connection with nucleic acid, refers to the pairing of bases. A with T or U, and G with C. The term complementary can also refer to nucleic acid molecules that are completely complementary, that is, form A to T or U pairs and G to C pairs across the entire reference sequence, as well as molecules that are at least about 80%, 85%, 90%, 95%, or 99% complementary.

[0257] As used herein, “template nucleic acid” refers to a nucleic acid sequence which can be used with a gene editing system, e.g., a CRISPR system, to insert nucleic acid sequence at or near a target sequence e.g., in homology-directed repair or homologous recombination. In embodiments, part of the template nucleic acid sequence is inserted at or near a target sequence. In embodiments, all or substantially all of the template nucleic acid sequence is inserted at or near a target sequence. The template nucleic acid can be single- or double-stranded RNA or DNA. In embodiments, the template nucleic acid is a vector, or is included in a vector, e.g., an AAV vector, plasmid DNA, minicircle or nanoplasmid. In aspects, the template nucleic acid comprises nucleic acid sequence encoding a chimeric antigen receptor (CAR), e.g., as described herein. In aspects, the template nucleic acid comprises or is included in a vector comprising nucleic acid sequence encoding a chimeric antigen receptor (CAR), e.g., as described herein. In embodiments, the template nucleic acid comprises nucleic acid sequence which is complementary to a nucleic acid sequence at or near the target sequence.

[0258] An “indel,” as the term is used herein, refers to a nucleic acid comprising one or more insertions of nucleotides, one or more deletions of nucleotides, or a combination of insertions and deletions of nucleotides, relative to an unmodified reference nucleic acid, that results from being exposed to a composition comprising a gRNA molecule, e.g., a CRISPR system. In some embodiments, an indel comprises nucleotides outside of the target sequence. Indels can be determined by sequencing a nucleic acid after being exposed to a composition comprising a gRNA molecule, for example, by NGS. With respect to the site of an indel, an indel is said to be “at or near” a reference site (e.g., a site complementary to a targeting domain of a gRNA molecule) if it comprises at least one insertion or deletion within about 10, 9, 8, 7, 6, 5, 4, 3, 2, or 1 nucleotide(s) of the reference site, or is overlapping with part or all of said reference site (e.g., comprises at least one insertion or deletion overlapping with, or within 10, 9, 8, 7, 6, 5, 4, 3, 2, or 1 nucleotides of a site complementary to the targeting domain of a gRNA molecule, e.g., a gRNA molecule described herein). In embodiments, indels are non-naturally occurring, for example, do not correspond to any naturally-occurring genetic mutation (e.g., insertion, deletion or combination thereof), for example, in the target cell.

[0259] An “indel pattern,” as the term is used herein, refers to a set of indels that results after exposure to a composition comprising a gene editing system, e.g., a CRISPR system, or gRNA molecule. In an embodiment, the indel pattern comprises or consists of the top three indels, by frequency of appearance. In an embodiment, the indel pattern comprises or consists of the top five indels, by frequency of appearance. In an embodiment, the indel pattern comprises or consists of the indels which are present at greater than about 5% frequency relative to all sequencing reads. In an embodiment, the indel pattern comprises or consists of the indels which are present at greater than about 10% frequency relative to total number of indel sequencing reads (i.e., those reads that do not consist of the unmodified reference nucleic acid sequence). In an embodiment, the indel pattern includes any 3 of the top five most frequently observed indels. The indel pattern may be determined, for example, by sequencing cells of a population of cells which were exposed to a gene editing system, e.g., a CRISPR system, e.g., a CRISPR system comprising a gRNA molecule described herein.

[0260] An “off-target indel,” as the term is used herein, refers to an indel at or near a site other than the target sequence of the targeting domain of the gRNA molecule. Such sites may comprise, for example, 1, 2, 3, 4, 5 or more mismatch nucleotides relative to the sequence complementary to the targeting domain of the gRNA. In exemplary embodiments, such sites are detected using targeted sequencing of in silico predicted off-target sites, or by an insertional method known in the art.

[0261] The term “inhibitory molecule” refers to a molecule which, when activated, causes or contributes to an inhibition of cell survival, activation, proliferation and/or function. The term also refers to the gene encoding said molecule and its associated regulatory elements, e.g., promoters, enhancers, etc. In embodiments, an inhibitory molecule is a molecule expressed on an immune effector cell, e.g., on a T cell. Non-limiting examples of inhibitory molecules are PD-1, PD-L1, PD-L2, CTLA4, TIM3, LAG3, CEACAM (e.g., CEACAM-1, CEACAM-3 and/or CEACAM-5), VISTA, BTLA, TIGIT, LAIR1, CD160, 2B4, CD80, CD86, B7-H3 (CD276), B7-H4 (VTCN1), HVEM (TNFRSF14 or CD107), KIR, A2aR, MHC class I, MHC class II, GAL9, adenosine, and TGF beta. It will be understood that the term inhibitory molecule may refer to the gene (and its associated regulatory elements) encoding an inhibitory molecule protein when it is used in connection with a target sequence or gRNA molecule. In some embodiments, gene editing systems, e.g., CRISPR systems, comprising one or more gRNA molecules comprising a targeting domain to a sequence of an inhibitory molecule are used in conjunction with the other features disclosed herein (e.g., a CRISPR system to a a first target, i.e., a molecule that regulates the expression of MHC II and a second target, i.e., a component of the T cell system, and optionally a third target, i.e., a molecule that regulates the expression of MHC I). Inhibitory molecules may also refer to domains, e.g., functional domains, fragments, mutants or variants, e.g., functional mutants or functional variants, of a naturally occurring inhibitory molecule. In embodiments, the inhibitory molecule is a mammalian, e.g., human, protein.

[0262] The terms “allogeneic T cell target” and “allogeneic T-cell target” are used interchangeably herein, and refer to a protein that mediates or contributes to a host versus graft response, mediates or contributes to a graft versus host response, or is a target for an immunosuppressant and the gene encoding said molecule and its associated regulatory elements, e.g., promoters. It will be understood that the term allogeneic T cell target may refer to the gene (and its associated regulatory elements) encoding an allogeneic T cell target protein when it is used in connection with a target sequence or gRNA molecule. Without being bound by theory, inhibition or elimination of one or more allogeneic T cell targets, e.g., by use of gene editing systems, e.g., CRISPR systems, to such targets, may improve the efficacy, survival, function and/or viability of, e.g., an allogeneic cell, e.g., an allogeneic T cell, for example, by reducing or eliminating undesirable immunogenicity (such as a host versus graft response or a graft versus host response). An allogeneic T cell target may also refer to a functional fragment, splice variant, or domain of a specified target.

[0263] In some embodiments, immunogenicity refers to the initiation of a humoral or cell-mediated immune response. In certain embodiments, undesirable immunogenicity may result from graft versus host disease (GvHD) or graft versus host response, e.g., following an allogeneic transplant, in which the donor/grafted cells or tissues attack the donee/host cells or tissues as foreign. In other embodiments, undesirable immunogenicity may result from host versus graft disease (HvGD), e.g., following an allogeneic transplant, in which the donee/host cells or tissues attack the donor/grafted cells or tissues as foreign.

[0264] In a non-limiting example, the protein that mediates or contributes to a graft versus host response or host versus graft response is one or more components of the T cell receptor. In an embodiment, the component of the T cell receptor is the T cell receptor alpha, for example the constant domain of the TCR alpha. In an embodiment, the component of the T cell receptor is the T cell receptor beta chain, for example the constant domain 1 or constant domain 2 of the TCR beta. In an embodiment, the component of the T cell receptor is the T cell receptor delta chain. In an embodiment, the component of the T cell receptor is the T cell receptor epsilon chain. In an embodiment, the component of the T cell receptor is the T cell receptor zeta chain. In an embodiment, the component of the T cell receptor is the T cell receptor gamma chain. Thus, in embodiments where the protein encoded by the allogeneic T cell target is a component of the TCR, the gene encoding the allogeneic T cell target may be, for example, TRAC, TRBC1, TRBC2, CD3D, CD3E, CD3G or CD247, and combinations thereof. A “component of the T cell system” or a “component of the T cell receptor” encompasses these genes and proteins.

[0265] In a non-limiting example, the protein that mediates or contributes to a graft versus host response or host versus graft response is an HLA protein, e.g., a major histocompatibility complex class I (MHC-I) protein, or a subunit thereof, or regulatory factor for expression of a MHC I, and combinations thereof. In an embodiment, the protein is beta 2-microglobulin (B2M). In other embodiments, the protein is a MHC-I HLA protein, for example, a HLA-A, HLA-B and HLA-C. Thus, in embodiments where the allogeneic T cell target protein is an HLA or B2M protein, the gene encoding the allogeneic T cell target may be, for example, HLA-A, HLA-B, HLA-C or B2M, and combinations thereof. In other embodiments, the allogeneic T cell target protein is NLRC5, and the gene encoding the allogeneic T cell target may be, for example, NLRC5. A “molecule that regulates the expression of MHC I” encompasses these genes and proteins.

[0266] In a non-limiting example, the protein that mediates or contributes to a graft versus host response or host versus graft response is a major histocompatibility complex class II (MHC II) molecule (e.g., HLA-Dx (where x refers to a letter of a MHC II protein, e.g., HLA-DM, HLA-DO, HLA-DR, HLA-DQ and/or HLA-DP)), or a subunit thereof, or regulatory factor for expression of a MHC II, and combinations thereof. A non-limiting example is CIITA (also referred to herein as C2TA). Thus, in embodiments where the allogeneic T cell target protein is a CIITA, the gene encoding the allogeneic T cell target may be, for example, CIITA. In another non-limiting example, the protein that mediates or contributes to a graft versus host response or host versus graft response is RFXANK. In another non-limiting example, the protein that mediates or contributes to a graft versus host response or host versus graft response is RFXAP. In another non-limiting example, the protein that mediates or contributes to a graft versus host response or host versus graft response is RFX5. In another non-limiting example, the protein that mediates or contributes to a graft versus host response or host versus graft response is RFX1. Protein complexes that are involved in MHC II transcription include nuclear factor Y (NF-Y), which comprises NF-YA, NF-YB, and NF-YC, and binds to the Y box of the conserved upstream sequences (CUS) in the distal promoter; oligomers of RFX, which contains RFXANK, RFXAP, and RFX5, and binds to the S box and RFX1, which binds to the X1 box, of the CUS in the distal promoter; and X2BP, which binds to the X2 box of the CUS in the distal promoter. RFX, NF-Y, and X2BP contribute to the formation of the enhanceosome. CIITA is a coactivator or transcriptional integrator that does not bind DNA, but interacts with the enhanceosome to form the transcriptosome. Posttranslational modification of CIITA increases activity on the MHC II promoter and results in the binding of various proteins, e.g., proteins that help remodel chromatin and recruit RNA polymerase II. In the proximal promoter, the octomer binding site (OBS) binds to the octamer binding protein and recruits Oct coactivator from B cells (OCAB), and the initiator site binds to transcription factors that help position RNA polymerase II for the initiation of transcription. See, e.g., Nekrep 2003, Immunity 18:453-57. A “molecule that regulates the expression of MHC II” encompasses these genes and proteins.

[0267] In some embodiments, the protein that mediates or contributes to a graft versus host response or a host versus graft response is selected from: HLA-DM, HLA-DO, HLA-DR, HLA-DQ HLA-DP, CIITA, RFXANK, RFXAP, RFX1, RFX5, NF-YA, NF-YB, NF-YC, X2BP, OCAB, HLA-A, HLA-B, HLA-C, B2M, NLRC5, TRAC, TRBC1, TRBC2, CD247, CD3, CD3D, CD3E, CD3G, DCK, CD52, FKBP1A, and NR3C1.

[0268] In embodiments, gene editing systems, e.g., CRISPR systems, comprising one or more gRNA molecules comprising a targeting domain to a sequence of an allogenic T cell target are used alone or in conjunction with the other features of the disclosure. In embodiments, CRISPR systems targeting 1) a component of the T cell system, e.g., TRAC, and 2) a gene encoding a molecule that regulates the expression of MHC II, e.g., RFX5, are used in conjunction with each other and/or with other features of the disclosure. In embodiments, CRISPR systems targeting 1) a component of the T cell system, e.g., TRAC, 2) a gene encoding a molecule that regulates the expression of MHC II, e.g., RFX5, and 3) a gene encoding a molecule that regulates the expression of MHC I, e.g., B2M, are used in conjunction with each other and/or with other features of the disclosure.

[0269] The term “target for an immunosuppressant” as used herein refers to a molecular target, for example a receptor or other protein that binds an immunosuppressant agent (the terms, “immunosuppressant” and “immunosuppressive” are used interchangeably herein in connection with an agent, or target for an agent). An immunosuppressant agent is an agent that suppresses immune function by one or more mechanisms of action. An immunosuppressive activity is a function of a compound which is manifested by a capability to diminish the extent and/or voracity of an immune response. One example of a type of activity exhibited by an immunosuppressant agent is eliminating T-cells, for example, activated T-cells. Another example of a type of activity exhibited by an immunosuppressant agent is reducing the activity or activation level of T-cells.

[0270] As a non-limiting example, an immunosuppressive agent can be a calcineurin inhibitor, a target of rapamycin, an interleukin-2 a-chain blocker, an inhibitor of inosine monophosphate dehydrogenase, an inhibitor of dihydrofolic acid reductase, a corticosteroid, cyclosporine, or an immunosuppressive antimetabolite. Classical cytotoxic immunosuppressants act by inhibiting DNA synthesis. Others may act through activation of T-cells or by inhibiting the activation of helper cells. As non-limiting examples, targets for immunosuppressive agent can be a receptor or binding partner for an immunosuppressive agent such as: deoxycytidine kinase, CD52, glucocorticoid receptor (GR), a FKBP family gene member, e.g., FKBP12, and a cyclophilin family gene member. In an embodiment, the target for an immunosuppressant is deoxycytidine kinase (DCK), and the immunosuppressant is a nucleoside analog-based drug such as cytarabine (cytosine arabinoside) or gemcitabine. In an embodiment, the target for an immunosuppressant is GR, and the immunosuppressant is a corticosteroid such as dexamethasone. In an embodiment, the target for an immunosuppressant is CD52, and the immunosuppressant is an anti-CD52 antibody or antigen-binding fragment thereof such as alemtuzumab (CAMPATH®). In an embodiment, the target for an immunosuppressant is FKBP12, and the immunosuppressant is FK506 (or analog or FKBP12-binding fragment thereof), cyclosporine, rapamycin or rapalog, or mTor inhibitor such as RAD001. Thus, in embodiments where the allogenic T cell target is a target for an immunosuppressant protein, the gene encoding the allogeneic T cell target may be, for example, NR3CJ, FKBP1A, CD52, or DCK, and combinations thereof. In some embodiments, gene editing systems, e.g., CRISPR systems, comprising one or more gRNA molecules comprising a targeting domain to a sequence of allogenic T cell target are used in conjunction with the other features of the disclosure (e.g., a CRISPR system to a first target, i.e., a molecule that regulates the expression of MHC II and a second target, i.e., a component of the T cell system, and optionally a third target, i.e., a molecule that regulates the expression of MHC I). In embodiments, CRISPR systems targeting a component of the T cell receptor, e.g., TRAC, and FKBP1A are used in conjunction with the other features of the disclosure (e.g., a CRISPR system to a first target, i.e., a molecule that regulates the expression of MHC II and a second target, i.e., a component of the T cell system, and optionally a third target, i.e., a molecule that regulates the expression of MHC I).

[0271] As used herein, “RFX” is intended to encompass RFXAP, RFX5, RFXANK, and RFX1. An example of the protein sequence of human RFXAP is provided: Genbank Ref. NM_000538. The RFXAP gene is located on chromosome 13, see Table 3. An example of the protein sequence of human RFX5 is provided: Genbank Ref. NM_000449. The RFX5 gene is located on chromosome 1, see Table 3. An example of the protein sequence of human RFX1 is provided: NM_002918. An example of the protein sequence of human RFXANK is also provided: NM_003721.

[0272] The term “gene” or “gene sequence” is meant to refer to a genetic sequence, e.g., a nucleic acid sequence. The term “gene” is intended to encompass a complete gene sequence or a partial gene sequence. The term “gene” refers to a sequence that encodes a protein or polypeptide or a sequence that does not encode a protein or polypeptide, e.g., a regulatory sequence, leader sequence, signal sequence, intron, or other non-protein coding sequence.

[0273] The term “intron” refers to nucleic acid sequence within a gene which is noncoding for the protein expressed from said gene. Intronic sequence may be transcribed from DNA into RNA, but may be removed before the protein is expressed.

[0274] The term “exon” refers to nucleic acid sequence within a gene which encodes a protein expressed from said gene.

[0275] The term “intron-exon junction,” when used in connection with a gene editing system or gRNA molecule, refers to a sequence which includes nucleotides of an exon and nucleotides of an intron. In exemplary embodiments, an intron-exon junction is a gRNA target sequence, whereby, when recognized by a CRISPR system comprising a gRNA comprising a targeting domain complementary to the intron-exon junction target sequence, said CRISPR system modifies, e.g., produces a break, at or near the target sequence between two nucleotides of an intron. In other exemplary embodiments, an intron-exon junction is a gRNA target sequence, whereby, when recognized by a CRISPR system comprising a gRNA comprising a targeting domain complementary to the intron-exon junction target sequence, said CRISPR system modifies, e.g., produces a break, at or near the target sequence between two nucleotides of an exon. In other exemplary embodiments, an intron-exon junction is a gRNA target sequence, whereby, when recognized by a CRISPR system comprising a gRNA comprising a targeting domain complementary to the intron-exon junction target sequence, said CRISPR system modifies, e.g., produces a break, at or near the target sequence between a nucleotide of an exon and a nucleotide of an intron.

[0276] The term “a,” “an,” or “the” refers to one or to more than one of the grammatical object of the article. The term may mean “one,” “one or more,” “at least one,” or “one or more than one.” By way of example, “an element” means one element or more than one element. The term “or” means “and/or” unless otherwise stated. The term “including” or “containing” is not limiting.

[0277] The term “about” when referring to a measurable value such as an amount, a temporal duration, and the like, is meant to encompass variations of ±20% or in some instances ±10%, or in some instances 5%, or in some instances 1%, or in some instances 0.1% from the specified value, as such variations are appropriate to perform the disclosed methods.

[0278] The term “Chimeric Antigen Receptor” or alternatively a “CAR” refers to a set of polypeptides, typically two in the simplest embodiments, which when in an immune effector cell, provides the cell with specificity for a target cell, typically a cancer cell, and with intracellular signal generation. In some embodiments, a CAR comprises at least an extracellular antigen binding domain, a transmembrane domain and a cytoplasmic signaling domain (also referred to herein as “an intracellular signaling domain”) comprising a functional signaling domain derived from a stimulatory molecule and/or costimulatory molecule as defined below. In some aspects, the set of polypeptides are contiguous with each other. In some embodiments, the set of polypeptides include a dimerization switch that, upon the presence of a dimerization molecule, can couple the polypeptides to one another, e.g., can couple an antigen binding domain to an intracellular signaling domain.

[0279] In one aspect, the stimulatory molecule is the zeta chain associated with the T cell receptor complex. In one aspect, the cytoplasmic signaling domain further comprises one or more functional signaling domains derived from at least one costimulatory molecule as defined below. In one aspect, the costimulatory molecule is chosen from the costimulatory molecules described herein, e.g., 41BB (i.e., CD137), CD27 and/or CD28.

[0280] In one aspect, the CAR comprises a chimeric fusion protein comprising an extracellular antigen binding domain, a transmembrane domain and an intracellular signaling domain comprising a functional signaling domain derived from a stimulatory molecule. In one aspect, the CAR comprises a chimeric fusion protein comprising an extracellular antigen binding domain, a transmembrane domain and an intracellular signaling domain comprising a functional signaling domain derived from a costimulatory molecule and a functional signaling domain derived from a stimulatory molecule. In one aspect, the CAR comprises a chimeric fusion protein comprising an extracellular antigen binding domain, a transmembrane domain and an intracellular signaling domain comprising two functional signaling domains derived from one or more costimulatory molecule(s) and a functional signaling domain derived from a stimulatory molecule. In one aspect, the CAR comprises a chimeric fusion protein comprising an extracellular antigen binding domain, a transmembrane domain and an intracellular signaling domain comprising at least two functional signaling domains derived from one or more costimulatory molecule(s) and a functional signaling domain derived from a stimulatory molecule. In one aspect the CAR comprises an optional leader sequence at the amino-terminus (N-ter) of the CAR fusion protein. In one aspect, the CAR further comprises a leader sequence at the N-terminus of the extracellular antigen binding domain, wherein the leader sequence is optionally cleaved from the antigen binding domain (e.g., a scFv) during cellular processing and localization of the CAR to the cellular membrane.

[0281] A CAR that comprises an antigen binding domain (e.g., a scFv, or TCR) that targets a specific tumor marker X, such as those described herein, is also referred to as XCAR. For example, a CAR that comprises an antigen binding domain that targets CD19 is referred to as CD19CAR. As another example, a CAR that comprises an antigen binding domain that targets BCMA is referred to as a BCMA CAR.

[0282] The term “signaling domain” refers to the functional portion derived from protein which acts by transmitting information within a cell to regulate cellular activity via defined signaling pathways, for example, by generating second messengers or functioning as effectors by responding to such messengers. In embodiments, a signaling domain refers to a variant or homolog, e.g., a functional variant or homolog, of a naturally occurring signaling domain, for example a signaling domain variant having at least about 90%, 95%, 96%, 97%, 98%, or 99% sequence identity to a naturally-occurring signaling domain.

[0283] The term “antibody,” as used herein, refers to one or more proteins or polypeptide sequence derived from an immunoglobulin molecule which specifically binds an antigen. Antibodies can be polyclonal or monoclonal, multiple or single chain, functional fragments (e.g., Fab fragments or scFv), or intact immunoglobulins, and may be derived from natural sources or from recombinant sources. Antibodies can be, e.g., dimers or tetramers of immunoglobulin molecules. Antibodies can be from any species or chimeric, including human or humanized antibodies.

[0284] The term “antibody fragment” refers to at least one portion of an antibody, that retains the ability to specifically interact with (e.g., by binding, steric hindrance, stabilizing/destabilizing, spatial distribution) an epitope of an antigen. In some embodiments, the antibody fragment retains an affinity for the epitope of an antigen broadly comparable to that of the intact immunoglobulin. For example, the antibody fragment may retain 80%, 85%, 90%, 95%, 99%, or more of the affinity seen with the intact immunoglobulin, as measured, e.g., by ELISA, Biacore, or other suitable assays. Examples of antibody fragments include, but are not limited to, Fab, Fab′, F(ab′)2, Fv fragments, scFv antibody fragments, disulfide-linked Fvs (sdFv), a Fd fragment consisting of the VH and CH1 domains, linear antibodies, single domain antibodies such as sdAb (either VL or VH), camelid VHH domains, multispecific antibodies formed from antibody fragments such as a bivalent fragment comprising two Fab fragments linked by a disulfide bridge at the hinge region, and an isolated CDR or other epitope binding fragments of an antibody. An antigen binding fragment can also be incorporated into single domain antibodies, maxibodies, minibodies, nanobodies, intrabodies, diabodies, triabodies, tetrabodies, v-NAR and bis-scFv (see, e.g., Hollinger and Hudson, Nature Biotechnology 23:1126-1136, 2005). Antigen binding fragments can also be grafted into scaffolds based on polypeptides such as a fibronectin type III (Fn3) (see U.S. Pat. No. 6,703,199, which describes fibronectin polypeptide minibodies).

[0285] The term “scFv” refers to a fusion protein comprising at least one antibody fragment comprising a variable region of a light chain and at least one antibody fragment comprising a variable region of a heavy chain, wherein the light and heavy chain variable regions are contiguously linked, e.g., directly or via a synthetic linker, e.g., a short flexible polypeptide linker, and capable of being expressed as a single chain polypeptide, and wherein the scFv retains the specificity of the intact antibody from which it is derived. Unless specified, as used herein an scFv may have the VL and VH variable regions in either order, e.g., with respect to the N-terminal and C-terminal ends of the polypeptide, the scFv may comprise VL-linker-VH or may comprise VH-linker-VL.

[0286] The portion of the CAR comprising an antibody or antibody fragment thereof may exist in a variety of forms where the antigen binding domain is expressed as part of a contiguous polypeptide chain including, for example, a single domain antibody fragment (sdAb), a single chain antibody (scFv), a humanized antibody or bispecific antibody (Harlow et al., 1999, In: Using Antibodies: A Laboratory Manual, Cold Spring Harbor Laboratory Press, NY; Harlow et al., 1989, In: Antibodies: A Laboratory Manual, Cold Spring Harbor, N.Y.; Houston et al., 1988, Proc. Natl. Acad. Sci. USA 85:5879-5883; Bird et al., 1988, Science 242:423-426). In one aspect, the antigen binding domain of a CAR composition comprises an antibody fragment. In a further aspect, the CAR comprises an antibody fragment that comprises a scFv. In another aspect, the CAR comprises a full antibody including the Fc region.

[0287] The portion of the CAR comprising a full antibody may be of any type (e.g., IgG, IgE, IgM, IgD, IgA and IgY), any class (e.g., IgG 1, IgG2, IgG 3, IgG4, IgA1 and IgA2) or any subclass. In some embodiments the Fc region is an IgG type constant region. In certain embodiments the Fc region of the full antibody includes an Fc region from IgG1, IgG2, IgG3, IgG4, IgA, IgA1, IgA2, IgM, IgE, IgD, and IgY, or a fragment thereof. In some embodiments the Fc region is an IgG1. The Fc region may be a native sequence Fc region, or a variant Fc region. In one embodiment, the Fc region is a human Fc region.

[0288] The portion of the CAR comprising an antibody or antibody fragment thereof may comprise the CDR sequences of an antibody coupled with human or other antibody framework sequences. The framework sequences may be the same or different from those in a starting antibody. The precise amino acid sequence boundaries of a given CDR can be determined using any of a number of well-known schemes, including those described by Kabat et al. (1991), “Sequences of Proteins of Immunological Interest,” 5th Ed. Public Health Service, National Institutes of Health, Bethesda, Md. (“Kabat” numbering scheme), Al-Lazikani et al., (1997) JMB 273, 927-948 (“Chothia” numbering scheme), or a combination thereof.

[0289] As used herein, the term “binding domain” or “antibody molecule” refers to a protein, e.g., an immunoglobulin chain or fragment thereof, comprising at least one immunoglobulin variable domain sequence. The term “binding domain” or “antibody molecule” encompasses antibodies and antibody fragments, as well as multispecific binding constructs. In an embodiment, an antibody molecule is a multispecific antibody molecule, e.g., it comprises a plurality of immunoglobulin variable domain sequences forming antigen-binding sites for different epitopes of antigens, when a first immunoglobulin variable domain sequence of the plurality has binding specificity for a first epitope and at least a second immunoglobulin variable domain sequence of the plurality has binding specificity for a second epitope. In an embodiment, a multispecific antibody molecule is a bispecific antibody molecule. A bispecific antibody has specificity for no more than two antigens. A bispecific antibody molecule is characterized by a first immunoglobulin variable domain sequence which has binding specificity for a first epitope and a second immunoglobulin variable domain sequence that has binding specificity for a second epitope. In other embodiments, a “binding domain” or “antibody molecule” encompasses multivalent antibody molecules, e.g., it comprises a plurality of immunoglobulin variable domain sequences forming two or more antigen binding sites for the same epitope of an antigen.

[0290] The term “antibody heavy chain,” refers to the larger of the two types of polypeptide chains present in antibody molecules in their naturally occurring conformations, and which normally determines the class to which the antibody belongs.

[0291] The term “antibody light chain,” refers to the smaller of the two types of polypeptide chains present in antibody molecules in their naturally occurring conformations. Kappa (κ) and lambda (λ) light chains refer to the two major antibody light chain isotypes.

[0292] The term “recombinant antibody” refers to an antibody which is generated using recombinant DNA technology, such as, for example, an antibody expressed by a bacteriophage or yeast expression system or in any other host cell. The term also includes an antibody which has been generated by the synthesis of a DNA molecule encoding the antibody and which DNA molecule expresses an antibody protein, or an amino acid sequence specifying the antibody, wherein the DNA or amino acid sequence has been obtained using recombinant DNA or amino acid sequence technology which is available and well known in the art.

[0293] The term “antigen” or “Ag” refers to a molecule that provokes an immune response. This immune response may involve either antibody production, or the activation of specific immunologically-competent cells, or both. The term also refers to any peptide bound by an antibody or antibody fragment thereof. The skilled artisan will understand that any macromolecule, including virtually all proteins or peptides, can serve as an antigen. Furthermore, antigens can be derived from recombinant or genomic DNA. A skilled artisan will understand that any DNA which comprises a nucleotide sequences or a partial nucleotide sequence encoding a protein that elicits an immune response therefore encodes an “antigen” as that term is used herein. Furthermore, one skilled in the art will understand that an antigen need not be encoded solely by a full length nucleotide sequence of a gene. It is readily apparent that the present disclosure includes, but is not limited to, the use of partial nucleotide sequences of more than one gene and that these nucleotide sequences are arranged in various combinations to encode polypeptides that elicit the desired immune response. Moreover, a skilled artisan will understand that an antigen need not be encoded by a “gene” at all. It is readily apparent that an antigen can be generated synthesized or can be derived from a biological sample, or might be macromolecule besides a polypeptide. Such a biological sample can include, but is not limited to a tissue sample, a tumor sample, a cell or a fluid with other biological components.

[0294] The term “anti-cancer effect” refers to a biological effect which can be manifested by various means, including but not limited to, e.g., a decrease in tumor volume, a decrease in the number of cancer cells, a decrease in the number of metastases, an increase in life expectancy, decrease in cancer cell proliferation, decrease in cancer cell survival, or amelioration of various physiological symptoms associated with the cancerous condition. An “anti-cancer effect” can also be manifested by the ability of the peptides, polynucleotides, cells and antibodies in prevention of the occurrence of cancer in the first place. The term “anti-tumor effect” refers to a biological effect which can be manifested by various means, including but not limited to, e.g., a decrease in tumor volume, a decrease in the number of tumor cells, a decrease in tumor cell proliferation, or a decrease in tumor cell survival.

[0295] The term “autologous” refers to any material derived from the same individual into whom it is introduced.

[0296] The term “allogeneic” refers to any material derived from a different animal of the same species as the individual to whom the material is introduced. Two or more individuals are said to be allogeneic to one another when the genes at one or more loci are not identical. In some aspects, allogeneic material from individuals of the same species may be sufficiently unlike genetically to interact antigenically

[0297] The term “xenogeneic” refers to a graft derived from an animal of a different species.

[0298] The term “cancer” refers to a disease characterized by the uncontrolled growth of aberrant cells. Cancer cells can spread locally or through the bloodstream and lymphatic system to other parts of the body. Examples of various cancers are described herein and include but are not limited to, breast cancer, prostate cancer, ovarian cancer, cervical cancer, skin cancer, pancreatic cancer, colorectal cancer, renal cancer, liver cancer, brain cancer, lymphoma, leukemia, lung cancer and the like. The terms “tumor” and “cancer” are used interchangeably herein, e.g., both terms encompass solid and liquid, e.g., diffuse or circulating, tumors. As used herein the term “cancer” or “tumor” includes premalignant, as well as malignant cancers and tumors.

[0299] “Derived from” as that term is used herein, indicates a relationship between a first and a second molecule. It generally refers to structural similarity between the first molecule and a second molecule and does not connote or include a process or source limitation on a first molecule that is derived from a second molecule. For example, in the case of an intracellular signaling domain that is derived from a CD3zeta molecule, the intracellular signaling domain retains sufficient CD3zeta structure such that is has the required function, namely, the ability to generate a signal under the appropriate conditions. It does not connote or include a limitation to a particular process of producing the intracellular signaling domain, e.g., it does not mean that, to provide the intracellular signaling domain, one must start with a CD3zeta sequence and delete unwanted sequence, or impose mutations, to arrive at the intracellular signaling domain.

[0300] The phrase “disease associated with expression of a tumor antigen as described herein” includes, but is not limited to, a disease associated with expression of a tumor antigen as described herein or condition associated with cells which express a tumor antigen as described herein including, e.g., proliferative diseases such as a cancer or malignancy or a precancerous condition such as a myelodysplasia, a myelodysplastic syndrome or a preleukemia; or a noncancer related indication associated with cells which express a tumor antigen as described herein. In one aspect, a cancer associated with expression of a tumor antigen as described herein is a hematological cancer. In one aspect, a cancer associated with expression of a tumor antigen as described herein is a solid cancer. Further diseases associated with expression of a tumor antigen described herein include, but not limited to, e.g., atypical and/or non-classical cancers, malignancies, precancerous conditions or proliferative diseases associated with expression of a tumor antigen as described herein. Non-cancer related indications associated with expression of a tumor antigen as described herein include, but are not limited to, e.g., autoimmune disease, (e.g., lupus), inflammatory disorders (allergy and asthma) and transplantation. In some embodiments, the tumor antigen-expressing cells express, or at any time expressed, mRNA encoding the tumor antigen. In an embodiment, the tumor antigen-expressing cells produce the tumor antigen protein (e.g., wild-type or mutant), and the tumor antigen protein may be present at normal levels or reduced levels. In an embodiment, the tumor antigen-expressing cells produced detectable levels of a tumor antigen protein at one point, and subsequently produced substantially no detectable tumor antigen protein.

[0301] The term “conservative sequence modifications” refers to amino acid modifications that do not significantly affect or alter the binding characteristics of the antibody or antibody fragment containing the amino acid sequence. Such conservative modifications include amino acid substitutions, additions and deletions. Modifications can be introduced into an antibody or antibody fragment described herein by standard techniques known in the art, such as site-directed mutagenesis and PCR-mediated mutagenesis. Conservative amino acid substitutions are ones in which the amino acid residue is replaced with an amino acid residue having a similar side chain. Families of amino acid residues having similar side chains have been defined in the art. These families include amino acids with basic side chains (e.g., lysine, arginine, histidine), acidic side chains (e.g., aspartic acid, glutamic acid), uncharged polar side chains (e.g., glycine, asparagine, glutamine, serine, threonine, tyrosine, cysteine, tryptophan), nonpolar side chains (e.g., alanine, valine, leucine, isoleucine, proline, phenylalanine, methionine), beta-branched side chains (e.g., threonine, valine, isoleucine) and aromatic side chains (e.g., tyrosine, phenylalanine, tryptophan, histidine). Thus, one or more amino acid residues within a CAR can be replaced with other amino acid residues from the same side chain family and the altered CAR can be tested using the functional assays described herein.

[0302] The term “stimulation,” refers to a primary response induced by binding of a stimulatory molecule (e.g., a TCR/CD3 complex or CAR) with its cognate ligand (or tumor antigen in the case of a CAR) thereby mediating a signal transduction event, such as, but not limited to, signal transduction via the TCR/CD3 complex or signal transduction via the appropriate NK receptor or signaling domains of the CAR. Stimulation can mediate altered expression of certain molecules.

[0303] The term “stimulatory molecule,” refers to a molecule expressed by an immune cell (e.g., T cell, NK cell, B cell) that provides the cytoplasmic signaling sequence(s) that regulate activation of the immune cell in a stimulatory way for at least some aspect of the immune cell signaling pathway. In one aspect, the signal is a primary signal that is initiated by, for instance, binding of a TCR/CD3 complex with an MHC molecule loaded with peptide, and which leads to mediation of a T cell response, including, but not limited to, proliferation, activation, differentiation, and the like. A primary cytoplasmic signaling sequence (also referred to as a “primary signaling domain”) that acts in a stimulatory manner may contain a signaling motif which is known as immunoreceptor tyrosine-based activation motif or ITAM. Examples of an ITAM containing cytoplasmic signaling sequence that is of particular use includes, but is not limited to, those derived from CD3 zeta, common FcR gamma (FCER1G), Fc gamma RIIa, FcR beta (Fc Epsilon R1b), CD3 gamma, CD3 delta, CD3 epsilon, CD79a, CD79b, DAP10, and DAP12. In a specific embodiment, the intracellular signaling domain in any one or more CARs comprises an intracellular signaling sequence, e.g., a primary signaling sequence derived from CD3-zeta. In a specific embodiment, the primary signaling sequence of CD3-zeta is the sequence provided as SEQ ID NO:21, or the equivalent residues from a non-human species, e.g., mouse, rodent, monkey, ape and the like. In a specific embodiment, the primary signaling sequence of CD3-zeta is the sequence as provided in SEQ ID NO: 24, or the equivalent residues from a non-human species, e.g., mouse, rodent, monkey, ape and the like.

[0304] The term “antigen presenting cell” or “APC” refers to an immune system cell such as an accessory cell (e.g., a B-cell, a dendritic cell, and the like) that displays a foreign antigen complexed with major histocompatibility complexes (MHC's) on its surface. T-cells may recognize these complexes using their T-cell receptors (TCRs). APCs process antigens and present them to T-cells.

[0305] An “intracellular signaling domain,” as the term is used herein, refers to an intracellular portion derived from a molecule, e.g., a stimulatory or costimulatory molecule. The intracellular signaling domain generates a signal that promotes an immune effector function of the CAR containing cell, e.g., a CART cell. Examples of immune effector function, e.g., in a CART cell, include cytolytic activity and helper activity, including the secretion of cytokines.

[0306] In an embodiment, the intracellular signaling domain can comprise a primary intracellular signaling domain. Exemplary primary intracellular signaling domains include those derived from the molecules responsible for primary stimulation, or antigen dependent simulation. In an embodiment, the intracellular signaling domain can comprise a costimulatory intracellular domain. Exemplary costimulatory intracellular signaling domains include those derived from molecules responsible for costimulatory signals, or antigen independent stimulation. For example, in the case of a CART, a primary intracellular signaling domain can comprise a cytoplasmic sequence of a T cell receptor, and a costimulatory intracellular signaling domain can comprise cytoplasmic sequence from co-receptor or costimulatory molecule.

[0307] A primary intracellular signaling domain can comprise a signaling motif which is known as an immunoreceptor tyrosine-based activation motif or ITAM. Examples of ITAM containing primary cytoplasmic signaling sequences include, but are not limited to, those derived from CD3 zeta, common FcR gamma (FCER1G), Fc gamma RIIa, FcR beta (Fc Epsilon R1b), CD3 gamma, CD3 delta, CD3 epsilon, CD79a, CD79b, DAP10, and DAP12.

[0308] The term “zeta” or alternatively “zeta chain”, “CD3-zeta” or “TCR-zeta” is defined as the protein provided as GenBan Acc. No. BAG36664.1, or the equivalent residues from a non-human species, e.g., mouse, rodent, monkey, ape and the like, and a “zeta stimulatory domain” or alternatively a “CD3-zeta stimulator domain” or a “TCR-zeta stimulatory domain” is defined as the amino acid residues from the cytoplasmic domain of the zeta chain, or functional derivatives thereof, that are sufficient to functionally transmit an initial signal necessary for T cell activation. In one aspect the cytoplasmic domain of zeta comprises residues 52 through 164 of GenBank Acc. No. BAG36664.1 or the equivalent residues from a non-human species, e.g., mouse, rodent, monkey, ape and the like, that are functional orthologs thereof. In one aspect, the “zeta stimulatory domain” or a “CD3-zeta stimulatory domain” is the sequence provided as SEQ ID NO: 21. In one aspect, the “zeta stimulatory domain” or a “CD3-zeta stimulatory domain” is the sequence provided as SEQ ID NO: 24.

[0309] The term “costimulatory molecule” refers to a cognate binding partner on a T cell that specifically binds with a costimulatory ligand, thereby mediating a costimulatory response by the T cell, such as, but not limited to, proliferation. Costimulatory molecules are cell surface molecules other than antigen receptors or their ligands that are contribute to an efficient immune response. Costimulatory molecules include, but are not limited to an MHC class I molecule, BTLA and a Toll ligand receptor, as well as OX40, CD27, CD28, CDS, ICAM-1, LFA-1 (CD11a/CD18), ICOS (CD278), and 4-1BB (CD137). Further examples of such costimulatory molecules include CDS, ICAM-1, GITR, BAFFR, HVEM (LIGHTR), SLAMF7, NKp80 (KLRF1), NKp44, NKp30, NKp46, CD160, CD19, CD4, CD8alpha, CD8beta, IL2R beta, IL2R gamma, IL7R alpha, ITGA4, VLA1, CD49a, ITGA4, IA4, CD49D, ITGA6, VLA-6, CD49f, ITGAD, CD11d, ITGAE, CD103, ITGAL, CD11a, LFA-1, ITGAM, CD11b, ITGAX, CD11c, ITGB1, CD29, ITGB2, CD18, LFA-1, ITGB7, NKG2D, NKG2C, TNFR2, TRANCE/RANKL, DNAM1 (CD226), SLAMF4 (CD244, 2B4), CD84, CD96 (Tactile), CEACAM1, CRTAM, Ly9 (CD229), CD160 (BY55), PSGL1, CD100 (SEMA4D), CD69, SLAMF6 (NTB-A, Ly108), SLAM (SLAMF1, CD150, IPO-3), BLAME (SLAMF8), SELPLG (CD162), LTBR, LAT, GADS, SLP-76, PAG/Cbp, CD19a, and a ligand that specifically binds with CD83.

[0310] A costimulatory intracellular signaling domain can be derived from the intracellular portion of a costimulatory molecule. A costimulatory molecule can be represented in the following protein families: TNF receptor proteins, Immunoglobulin-like proteins, cytokine receptors, integrins, signaling lymphocytic activation molecules (SLAM proteins), and activating NK cell receptors. Examples of such molecules include CD27, CD28, 4-1BB (CD137), OX40, GITR, CD30, CD40, ICOS, BAFFR, HVEM, ICAM-1, lymphocyte function-associated antigen-1 (LFA-1), CD2, CDS, CD7, CD287, LIGHT, NKG2C, NKG2D, SLAMF7, NKp80, NKp30, NKp44, NKp46, CD160, B7-H3, and a ligand that specifically binds with CD83, and the like.

[0311] The intracellular signaling domain can comprise the entire intracellular portion, or the entire native intracellular signaling domain, of the molecule from which it is derived, or a functional fragment or derivative thereof.

[0312] The term “4-1BB” refers to a member of the TNFR superfamily with an amino acid sequence provided as GenBank Acc. No. AAA62478.2, or the equivalent residues from a non-human species, e.g., mouse, rodent, monkey, ape and the like; and a “4-1BB costimulatory domain” is defined as amino acid residues 214-255 of GenBank Acc. No. AAA62478.2, or the equivalent residues from a non-human species, e.g., mouse, rodent, monkey, ape and the like, and in embodiments, sequences, e.g., functional sequences, derived therefrom. In one aspect, the “4-1BB costimulatory domain” is the sequence provided as SEQ ID NO: 16 or the equivalent residues from a non-human species, e.g., mouse, rodent, monkey, ape and the like.

[0313] “Immune effector cell,” as that term is used herein, refers to a cell that is involved in an immune response, e.g., in the promotion of an immune effector response. Examples of immune effector cells include T cells, e.g., alpha/beta T cells and gamma/delta T cells, B cells, natural killer (NK) cells, natural killer T (NKT) cells, mast cells, and myeloic-derived phagocytes.

[0314] “Immune effector function or immune effector response,” as that term is used herein, refers to function or response, e.g., of an immune effector cell, that enhances or promotes an immune attack of a target cell. E.g., an immune effector function or response refers a property of a T or NK cell that promotes killing or the inhibition of growth or proliferation, of a target cell. In the case of a T cell, primary stimulation and co-stimulation are examples of immune effector function or response.

[0315] The term “encoding” refers to the inherent property of specific sequences of nucleotides in a polynucleotide, such as a gene, a cDNA, or an mRNA, to serve as templates for synthesis of other polymers and macromolecules in biological processes having either a defined sequence of nucleotides (e.g., rRNA, tRNA and mRNA) or a defined sequence of amino acids and the biological properties resulting therefrom. Thus, a gene, cDNA, or RNA, encodes a protein if transcription and translation of mRNA corresponding to that gene produces the protein in a cell or other biological system. Both the coding strand, the nucleotide sequence of which is identical to the mRNA sequence and is usually provided in sequence listings, and the non-coding strand, used as the template for transcription of a gene or cDNA, can be referred to as encoding the protein or other product of that gene or cDNA.

[0316] Unless otherwise specified, a “nucleotide sequence encoding an amino acid sequence” includes all nucleotide sequences that are degenerate versions of each other and that encode the same amino acid sequence. The phrase nucleotide sequence that encodes a protein or an RNA may also include introns to the extent that the nucleotide sequence encoding the protein may in some version contain an intron(s).

[0317] The term “effective amount” or “therapeutically effective amount” are used interchangeably herein, and refer to an amount of a compound, formulation, material, or composition, as described herein effective to achieve a particular biological result.

[0318] The term “endogenous” refers to any material from or produced inside an organism, cell, tissue or system.

[0319] The term “exogenous” refers to any material introduced from or produced outside an organism, cell, tissue or system.

[0320] The term “expression” refers to the transcription and/or translation of a particular nucleotide sequence driven by a promoter.

[0321] The term “transfer vector” refers to a composition of matter which comprises an isolated nucleic acid and which can be used to deliver the isolated nucleic acid to the interior of a cell. Numerous vectors are known in the art including, but not limited to, linear polynucleotides, polynucleotides associated with ionic or amphiphilic compounds, plasmids, and viruses. Thus, the term “transfer vector” includes an autonomously replicating plasmid or a virus. The term should also be construed to further include non-plasmid and non-viral compounds which facilitate transfer of nucleic acid into cells, such as, for example, a polylysine compound, liposome, and the like. Examples of viral transfer vectors include, but are not limited to, adenoviral vectors, adeno-associated virus vectors, retroviral vectors, lentiviral vectors, and the like.

[0322] The term “expression vector” refers to a vector comprising a recombinant polynucleotide comprising expression control sequences operatively linked to a nucleotide sequence to be expressed. An expression vector comprises sufficient cis-acting elements for expression; other elements for expression can be supplied by the host cell or in an in vitro expression system. Expression vectors include all those known in the art, including cosmids, plasmids (e.g., naked or contained in liposomes) and viruses (e.g., lentiviruses, retroviruses, adenoviruses, and adeno-associated viruses) that incorporate the recombinant polynucleotide.

[0323] The term “homologous,” “homology” or “identity” refers to the subunit sequence identity between two polymeric molecules, e.g., between two nucleic acid molecules, such as, two DNA molecules or two RNA molecules, or between two polypeptide molecules. When a subunit position in both of the two molecules is occupied by the same monomeric subunit; e.g., if a position in each of two DNA molecules is occupied by adenine, then they are homologous or identical at that position. The homology between two sequences is a direct function of the number of matching or homologous positions; e.g., if half (e.g., five positions in a polymer ten subunits in length) of the positions in two sequences are homologous, the two sequences are 50% homologous; if 90% of the positions (e.g., 9 of 10), are matched or homologous, the two sequences are 90% homologous.

[0324] “Humanized” forms of non-human (e.g., murine) antibodies are chimeric immunoglobulins, immunoglobulin chains or fragments thereof (such as Fv, Fab, Fab′, F(ab′)2 or other antigen-binding subsequences of antibodies) which contain minimal sequence derived from non-human immunoglobulin. For the most part, humanized antibodies and antibody fragments thereof are human immunoglobulins (recipient antibody or antibody fragment) in which one or more, e.g., all six, complementary-determining regions (CDRs) of the recipient are replaced by residues from a CDR of a non-human species (donor antibody) such as mouse, rat or rabbit having the desired specificity, affinity, and capacity. In some instances, Fv framework region (FR) residues of the human immunoglobulin are replaced by corresponding non-human residues. Furthermore, a humanized antibody/antibody fragment can comprise residues which are found neither in the recipient antibody nor in the imported CDR or framework sequences as long as the same antigen specificity is retained. These modifications can further refine and optimize antibody or antibody fragment performance. In general, the humanized antibody or antibody fragment thereof will comprise substantially all of at least one, and typically two, variable domains, in which all or substantially all of the CDR regions correspond to those of a non-human immunoglobulin and all or a significant portion of the FR regions are those of a human immunoglobulin sequence. The humanized antibody or antibody fragment can also comprise at least a portion of an immunoglobulin constant region (Fc), typically that of a human immunoglobulin. For further details, see Jones et al., Nature, 321: 522-525, 1986; Reichmann et al., Nature, 332: 323-329, 1988; Presta, Curr. Op. Struct. Biol., 2: 593-596, 1992.

[0325] “Fully human” refers to an immunoglobulin, such as an antibody or antibody fragment, where the whole molecule is of human origin or consists of an amino acid sequence identical to a human form of the antibody or immunoglobulin.

[0326] The term “isolated” means altered or removed from the natural state. For example, a nucleic acid or a peptide naturally present in a living animal is not “isolated,” but the same nucleic acid or peptide partially or completely separated from the coexisting materials of its natural state is “isolated.” An isolated nucleic acid or protein can exist in substantially purified form, or can exist in a non-native environment such as, for example, a host cell.

[0327] The term “operably linked” or “transcriptional control” refers to functional linkage between a regulatory sequence and a heterologous nucleic acid sequence resulting in expression of the latter. For example, a first nucleic acid sequence is operably linked with a second nucleic acid sequence when the first nucleic acid sequence is placed in a functional relationship with the second nucleic acid sequence. For instance, a promoter is operably linked to a coding sequence if the promoter affects the transcription or expression of the coding sequence. The promoter or regulatory sequence may be a cis-acting element or a trans-acting element. Operably linked DNA sequences can be contiguous with each other and, e.g., where necessary to join two protein coding regions, are in the same reading frame.

[0328] The term “parenteral” administration of an immunogenic composition includes, e.g., subcutaneous (s.c.), intravenous (i.v.), intramuscular (i.m.), or intrasternal injection, intratumoral, or infusion techniques.

[0329] The term “nucleic acid” or “polynucleotide” refers to deoxyribonucleic acids (DNA) or ribonucleic acids (RNA) and polymers thereof in either single- or double-stranded form. Unless specifically limited, the term encompasses nucleic acids containing known analogues of natural nucleotides that have similar binding properties as the reference nucleic acid and are metabolized in a manner similar to naturally occurring nucleotides. Unless otherwise indicated, a particular nucleic acid sequence also implicitly encompasses conservatively modified variants thereof (e.g., degenerate codon substitutions), alleles, orthologs, SNPs, and complementary sequences as well as the sequence explicitly indicated. Specifically, degenerate codon substitutions may be achieved by generating sequences in which the third position of one or more selected (or all) codons is substituted with mixed-base and/or deoxyinosine residues (Batzer et al., Nucleic Acid Res. 19:5081 (1991); Ohtsuka et al., J. Biol. Chem. 260:2605-2608 (1985); and Rossolini et al., Mol. Cell. Probes 8:91-98 (1994)).

[0330] The terms “peptide,” “polypeptide,” and “protein” are used interchangeably, and refer to a compound comprised of amino acid residues covalently linked by peptide bonds. A protein or peptide must contain at least two amino acids, and no limitation is placed on the maximum number of amino acids that can comprise a protein's or peptide's sequence. Polypeptides include any peptide or protein comprising two or more amino acids joined to each other by peptide bonds. As used herein, the term refers to both short chains, which also commonly are referred to in the art as peptides, oligopeptides and oligomers, for example, and to longer chains, which generally are referred to in the art as proteins, of which there are many types. “Polypeptides” include, for example, biologically active fragments, substantially homologous polypeptides, oligopeptides, homodimers, heterodimers, variants of polypeptides, modified polypeptides, derivatives, analogs, fusion proteins, among others. A polypeptide includes a natural peptide, a recombinant peptide, or a combination thereof.

[0331] The term “promoter” refers to a DNA sequence recognized by the synthetic machinery of the cell, or introduced synthetic machinery, required to initiate the specific transcription of a polynucleotide sequence.

[0332] The term “promoter/regulatory sequence” refers to a nucleic acid sequence which is required for expression of a gene product operably linked to the promoter/regulatory sequence. In some instances, this sequence may be the core promoter sequence and in other instances, this sequence may also include an enhancer sequence and other regulatory elements which are required for expression of the gene product. The promoter/regulatory sequence may, for example, be one which expresses the gene product in a tissue specific manner.

[0333] A “constitutive” promoter refers to a nucleotide sequence which, when operably linked with a polynucleotide which encodes or specifies a gene product, causes the gene product to be produced in a cell undermost or all physiological conditions of the cell.

[0334] An “inducible” promoter refers to a nucleotide sequence which, when operably linked with a polynucleotide which encodes or specifies a gene product, causes the gene product to be produced in a cell substantially only when an inducer which corresponds to the promoter is present in the cell.

[0335] A “tissue-specific” promoter refers to a nucleotide sequence which, when operably linked with a polynucleotide encodes or specified by a gene, causes the gene product to be produced in a cell substantially only if the cell is a cell of the tissue type corresponding to the promoter.

[0336] The terms “cancer associated antigen” or “tumor antigen” interchangeably refers to a molecule (typically a protein, carbohydrate or lipid) that is expressed on the surface of a cancer cell, either entirely or as a fragment (e.g., MHC or peptide fragment), and which is useful for the preferential targeting of a pharmacological agent to the cancer cell. In some embodiments, a tumor antigen is a marker expressed by both normal cells and cancer cells, e.g., a lineage marker, e.g., CD19 on B cells. In some embodiments, a tumor antigen is a cell surface molecule that is overexpressed in a cancer cell in comparison to a normal cell, for instance, 1-fold over expression, 2-fold overexpression, 3-fold overexpression or more in comparison to a normal cell. In some embodiments, a tumor antigen is a cell surface molecule that is underexpressed in a cancer cell in comparison to a normal cell, for instance, 1-fold underexpression, 2-fold underexpression, 3-fold underexpression or more in comparison to a normal cell. In some embodiments, a tumor antigen is a cell surface molecule that is inappropriately synthesized in the cancer cell, for instance, a molecule that contains deletions, additions or mutations in comparison to the molecule expressed on a normal cell.

[0337] In some embodiments, a tumor antigen will be expressed exclusively on the cell surface of a cancer cell, entirely or as a fragment (e.g., MHC or peptide fragment), and not synthesized or expressed on the surface of a normal cell. In some embodiments, the CARs of the present disclosure include CARs comprising an antigen binding domain (e.g., antibody or antibody fragment) that binds to a tumor antigen or fragment, e.g., a MHC presented peptide.

[0338] Normally, peptides derived from endogenous proteins fill the pockets of Major histocompatibility complex (MHC) class I molecules, and are recognized by T cell receptors (TCRs) on CD8+ T lymphocytes. The MHC class I complexes are constitutively expressed by all nucleated cells. In cancer, virus-specific and/or tumor-specific peptide/MHC complexes represent a unique class of cell surface targets for immunotherapy. TCR-like antibodies targeting peptides derived from viral or tumor antigens in the context of human leukocyte antigen (HLA)-A1 or HLA-A2 have been described (see, e.g., Sastry et al., J Virol. 2011 85(5):1935-1942; Sergeeva et al., Blood, 2011 117(16):4262-4272; Verma et al., J Immunol 2010 184(4):2156-2165; Willemsen et al., Gene Ther 2001 8(21):1601-1608; Dao et al., Sci Transl Med 2013 5(176):176ra33; Tassev et al., Cancer Gene Ther 2012 19(2):84-100). For example, TCR-like antibody can be identified from screening a library, such as a human scFv phage displayed library.

[0339] The term “tumor-supporting antigen” or “cancer-supporting antigen” interchangeably refer to a molecule (typically a protein, carbohydrate or lipid) that is expressed on the surface of a cell that is, itself, not cancerous, but supports the cancer cells, e.g., by promoting their growth or survival e.g., resistance to immune cells. Exemplary cells of this type include stromal cells and myeloid-derived suppressor cells (MDSCs). The tumor-supporting antigen itself need not play a role in supporting the tumor cells so long as the antigen is present on a cell that supports cancer cells.

[0340] The term “flexible polypeptide linker” or “linker” as used in the context of a scFv refers to a peptide linker that consists of amino acids such as glycine and/or serine residues used alone or in combination, to link variable heavy and variable light chain regions together. In one embodiment, the flexible polypeptide linker is a Gly/Ser linker and comprises the amino acid sequence (Gly-Gly-Gly-Ser)n, where n is a positive integer equal to or greater than 1. For example, n=1, n=2, n=3, n=4, n=5 and n=6, n=7, n=8, n=9 and n=10 (SEQ ID NO: 32). In one embodiment, the flexible polypeptide linkers include, but are not limited to, (Gly4 Ser)4 (SEQ ID NO: 34) or (Gly4 Ser)3 (SEQ ID NO: 35). In another embodiment, the linkers include multiple repeats of (Gly2Ser), (GlySer) or (Gly3Ser) (SEQ ID NO: 36). Also included within the scope of the disclosure are linkers described in WO2012/138475, incorporated herein by reference.

[0341] As used herein in connection with a messenger RNA (mRNA), a 5′ cap (also termed an RNA cap, an RNA 7-methylguanosine cap or an RNA m7G cap) is a modified guanine nucleotide that has been added to the “front” or 5′ end of a eukaryotic messenger RNA shortly after the start of transcription. The 5′ cap consists of a terminal group which is linked to the first transcribed nucleotide. Its presence is critical for recognition by the ribosome and protection from RNases. Cap addition is coupled to transcription, and occurs co-transcriptionally, such that each influences the other. Shortly after the start of transcription, the 5′ end of the mRNA being synthesized is bound by a cap-synthesizing complex associated with RNA polymerase. This enzymatic complex catalyzes the chemical reactions that are required for mRNA capping. Synthesis proceeds as a multi-step biochemical reaction. The capping moiety can be modified to modulate functionality of mRNA such as its stability or efficiency of translation.

[0342] As used herein, “in vitro transcribed RNA” refers to RNA, preferably mRNA, that has been synthesized in vitro. Generally, the in vitro transcribed RNA is generated from an in vitro transcription vector. The in vitro transcription vector comprises a template that is used to generate the in vitro transcribed RNA.

[0343] As used herein, a “poly(A)” is a series of adenosines attached by polyadenylation to the mRNA. In the preferred embodiment of a construct for transient expression, the polyA is between 50 and 5000 (SEQ ID NO: 1871), preferably greater than 64, more preferably greater than 100, most preferably greater than 300 or 400. Poly(A) sequences can be modified chemically or enzymatically to modulate mRNA functionality such as localization, stability or efficiency of translation.

[0344] As used herein. “polyadenylation” refers to the covalent linkage of a polyadenylyl moiety, or its modified variant, to a messenger RNA molecule. In eukaryotic organisms, most messenger RNA (mRNA) molecules are polyadenylated at the 3 end. The 3′ poly(A) tail is a long sequence of adenine nucleotides (often several hundred) added to the pre-mRNA through the action of an enzyme, polyadenylate polymerase. In higher eukaryotes, the poly(A) tail is added onto transcripts that contain a specific sequence, the polyadenylation signal. The poly(A) tail and the protein bound to it aid in protecting mRNA from degradation by exonucleases. Polyadenylation is also important for transcription termination, export of the mRNA from the nucleus, and translation. Polyadenylation occurs in the nucleus immediately after transcription of DNA into RNA, but additionally can also occur later in the cytoplasm. After transcription has been terminated, the mRNA chain is cleaved through the action of an endonuclease complex associated with RNA polymerase. The cleavage site is usually characterized by the presence of the base sequence AAUAAA near the cleavage site. After the mRNA has been cleaved, adenosine residues are added to the free 3′ end at the cleavage site.

[0345] As used herein, “transient” refers to expression of a non-integrated transgene for a period of hours, days or weeks, wherein the period of time of expression is less than the period of time for expression of the gene if integrated into the genome or contained within a stable plasmid replicon in the host cell.

[0346] As used herein, the terms “treat”, “treatment” and “treating” refer to a partial or complete reduction or amelioration of the progression, severity, and/or duration of a proliferative disorder, or the amelioration of one or more symptoms (preferably, one or more discernible symptoms) of a proliferative disorder resulting from the administration of one or more therapies (e.g., one or more therapeutic agents such as a CAR of the disclosure). In specific embodiments, the terms “treat”, “treatment” and “treating” refer to the amelioration of at least one measurable physical parameter of a proliferative disorder, such as growth of a tumor, as well as parameters not necessarily discernible by the patient. In other embodiments the terms “treat”, “treatment” and “treating”—refer to the inhibition of the progression of a proliferative disorder, such as stabilization of a tumor size, either physically by, e.g., stabilization of a discernible symptom, physiologically by, e.g., stabilization of a physical parameter, or both. In other embodiments the terms “treat”, “treatment” and “treating” refer to the reduction or stabilization of tumor size or cancerous cell count.

[0347] A “signal transduction pathway” refers to the biochemical relationship between two or more signal transduction molecules that play a role in the transmission of a signal from one portion of a cell to another portion of the cell or to another cell. The phrase “cell surface receptor” includes molecules and complexes of molecules capable of receiving a signal and transmitting signal across the membrane of a cell.

[0348] A “subject” is intended to include living organisms in which an immune response can be elicited (e.g., a mammal such as a human).

[0349] A “substantially purified” cell refers to a cell that is essentially free of other cell types. A substantially purified cell also refers to a cell which has been separated from other cell types with which it is normally associated in its naturally occurring state. In some instances, a population of substantially purified cells refers to a homogenous population of cells. In other instances, this term refers simply to cell that have been separated from the cells with which they are naturally associated in their natural state. In some aspects, the cells are cultured in vitro. In other aspects, the cells are not cultured in vitro.

[0350] A “therapeutic” as used herein means a treatment. A therapeutic effect is obtained by partial or complete reduction, suppression, remission, or eradication of a disease state or symptom.

[0351] The term “prophylaxis” as used herein means the partial or complete prevention of or protective treatment for a disease or disease state.

[0352] In the context of the present disclosure, “tumor antigen” or “hyperproliferative disorder antigen” or “antigen associated with a hyperproliferative disorder” refers to antigens that are common to specific hyperproliferative disorders. In certain aspects, the hyperproliferative disorder antigens are derived from, cancers including but not limited to primary or metastatic melanoma, thymoma, lymphoma, sarcoma, lung cancer, liver cancer, non-Hodgkin lymphoma, Hodgkin lymphoma, leukemias, uterine cancer, cervical cancer, bladder cancer, kidney cancer and adenocarcinomas such as breast cancer, prostate cancer, ovarian cancer, pancreatic cancer, and the like.

[0353] The term “transfected” or “transformed” or “transduced” refers to a process by which exogenous nucleic acid is transferred or introduced into the host cell. A “transfected” or “transformed” or “transduced” cell is one which has been transfected, transformed or transduced with exogenous nucleic acid. The cell includes the primary subject cell and its progeny.

[0354] The term “specifically binds,” refers to a molecule that preferentially recognizes and binds a binding partner (e.g., a protein or nucleic acid) over other molecules present in a sample.

[0355] “Membrane anchor” or “membrane tethering domain”, as that term is used herein, refers to a polypeptide or moiety, e.g., a myristoyl group, sufficient to anchor an extracellular or intracellular domain to the plasma membrane.

[0356] The term “bioequivalent” refers to an amount of an agent other than the reference compound (e.g., RAD001), required to produce an effect equivalent to the effect produced by the reference dose or reference amount of the reference compound (e.g., RAD001). In an embodiment the effect is the level of mTOR inhibition, e.g., as measured by P70 S6 kinase inhibition, e.g., as evaluated in an in vivo or in vitro assay, e.g., as measured by an assay described herein, e.g., the Boulay assay. In an embodiment, the effect is alteration of the ratio of PD-1 positive/PD-1 negative T cells, as measured by cell sorting. In an embodiment a bioequivalent amount or dose of an mTOR inhibitor is the amount or dose that achieves the same level of P70 S6 kinase inhibition as does the reference dose or reference amount of a reference compound. In an embodiment, a bioequivalent amount or dose of an mTOR inhibitor is the amount or dose that achieves the same level of alteration in the ratio of PD-1 positive/PD-1 negative T cells as does the reference dose or reference amount of a reference compound.

[0357] The term “low, immune enhancing, dose” when used in conjunction with an mTOR inhibitor, e.g., an allosteric mTOR inhibitor, e.g., RAD001 or rapamycin, or a catalytic mTOR inhibitor, refers to a dose of mTOR inhibitor that partially, but not fully, inhibits mTOR activity, e.g., as measured by the inhibition of P70 S6 kinase activity. Methods for evaluating mTOR activity, e.g., by inhibition of P70 S6 kinase, are discussed herein. The dose is insufficient to result in complete immune suppression but is sufficient to enhance the immune response. In an embodiment, the low, immune enhancing, dose of mTOR inhibitor results in a decrease in the number of PD-1 positive T cells and/or an increase in the number of PD-1 negative T cells, or an increase in the ratio of PD-1 negative T cells/PD-1 positive T cells. In an embodiment, the low, immune enhancing, dose of mTOR inhibitor results in an increase in the number of naive T cells. In an embodiment, the low, immune enhancing, dose of mTOR inhibitor results in one or more of the following:
[0358] an increase in the expression of one or more of the following markers: CD62Lhigh, CD127high, CD27+, and BCL2, e.g., on memory T cells, e.g., memory T cell precursors;
[0359] a decrease in the expression of KLRG1, e.g., on memory T cells, e.g., memory T cell precursors; and
[0360] an increase in the number of memory T cell precursors, e.g., cells with any one or combination of the following characteristics: increased CD62Lhigh, increased CD127high, increased CD27+, decreased KLRG1, and increased BCL2;
[0361] wherein any of the changes described above occurs, e.g., at least transiently, e.g., as compared to a non-treated subject.

[0362] “Refractory” as used herein refers to a disease, e.g., cancer, that does not respond to a treatment. In embodiments, a refractory cancer can be resistant to a treatment before or at the beginning of the treatment. In other embodiments, the refractory cancer can become resistant during a treatment. A refractory cancer is also called a resistant cancer.

[0363] “Relapsed” as used herein refers to the return of a disease (e.g., cancer) or the signs and symptoms of a disease such as cancer after a period of improvement, e.g., after prior treatment of a therapy, e.g., cancer therapy.

[0364] Ranges: throughout this disclosure, various aspects can be presented in a range format. It should be understood that the description in range format is merely for convenience and brevity and should not be construed as an inflexible limitation on the scope of the disclosure. Accordingly, the description of a range should be considered to have specifically disclosed all the possible subranges as well as individual numerical values within that range. For example, description of a range such as from 1 to 6 should be considered to have specifically disclosed subranges such as from 1 to 3, from 1 to 4, from 1 to 5, from 2 to 4, from 2 to 6, from 3 to 6 etc., as well as individual numbers within that range, for example, 1, 2, 2.7, 3, 4, 5, 5.3, and 6. As another example, a range such as 95-99% identity, includes something with 95%, 96%, 97%, 98% or 99% identity, and includes subranges such as 96-99%, 96-98%, 96-97%, 97-99%, 97-98% and 98-99% identity. This applies regardless of the breadth of the range. All specified ranges also include the endpoints unless otherwise stated.

### DETAILED DESCRIPTION

[0365] The gRNA molecules, compositions and methods described herein relate to genome editing, for example, gene editing in eukaryotic cells, in particular at a plurality of targets, for example, using a CRISPR/Cas system, e.g., a Cas9 system, e.g., described herein. In particular embodiments, the gRNA molecules, compositions and methods described herein provide for the targeting of a CRISPR system to at least two target sequences, a first target, i.e., a molecule that regulates the expression of MHC II and a second target, i.e., a component of the T cell system, and optionally a third target, i.e., a molecule that regulates the expression of MHC I. In further aspects, the disclosure provides for modification (e.g., insertion or deletion) of a first target, i.e., a molecule that regulates the expression of MHC II and a second target, i.e., a component of the T cell system, and optionally a third target, i.e., a molecule that regulates the expression of MHC I. In further aspects the disclosure provides for insertion of a nucleic acid sequence encoding a heterologous protein, for example a CAR molecule, for example as described herein, at or near the target sequence bound by a gene editing system, e.g., bound by a gRNA molecule described herein. Such nucleic acid sequence encoding a heterologous protein may be separately introduced into the cell as a template nucleic acid as described herein, for example, including homology arms, or as part of a vector, or introduced at the same time as the gene editing system.

[0366] Without being bound by theory, the disclosure is based in part on the finding that a CAR gene insertion into a first target, i.e., a molecule that regulates the expression of MHC II, and a second target, i.e., a component of the T cell system, results in a CAR-expressing T cell with improved properties. In some embodiments, MHC II expression is modified by targeting two or more molecules that regulate the expression of MHC II, e.g., CIITA and RFXAP, or CIITA and RFX5, or RFXAP and RFX5. In some embodiments, combinations targeting CIITA and another molecule (e.g., an RFX molecule) provide surprisingly improved reduction in MHC I expression. The disclosure is further based in part on the discovery that targeting a plurality of targets, including a first target, i.e., a molecule that regulates the expression of MHC II and a second target, i.e., a component of the T cell system, and optionally a third target, i.e., a molecule that regulates the expression of MHC I, confers several unexpected advantages. In some embodiments, the CAR-expressing T cell has reduced MHC I expression and results in improved allogenicity as compared to a CAR-expressing T cell in which a molecule that regulates the expression of MHC II has not been modified. Thus, in an aspect, the disclosure provides gene editing systems, gRNA molecules, CRISPR systems and methods useful for insertion of nucleic acid sequence encoding a heterologous protein, for example a CAR molecule, as described herein, within a gene encoding a molecule that regulates the expression of MHC II, and also optionally within a component of the T cell system of a cell, for example an immune effector cell.

[0367] In some embodiments, targeting an intron or intron-exon junction may provide some advantages. First, for example, gRNAs may be able to create indels, including 1- or 2-nucleotide deletion indels, at or near target sequences with high frequencies and in particular, combining CRISPR systems comprising these gRNA molecules with a template nucleic acid, e.g., a template nucleic acid encoding a CAR (e.g., as described herein), may result in high frequencies of incorporation of sequence of the template nucleic acid at or near the site targeted by the gRNA molecule. These indels and insertions (e.g., insertions of sequence of the template nucleic acid) when created within an exon, can lead to a frameshift mutation and thus significant (e.g., total) inhibition of expression of the protein encoded by the gene. Because of the high frequency of indel formation, such frameshifts can occur at both alleles of the gene in a high percentage of the cells. Without being bound by theory, targeting an intron sequence with a CRISPR system, particularly as a site for insertion of nucleic acid encoding a heterologous protein, may therefore be beneficial where reduced, but not eliminated, function and/or expression of the target gene is desired because, for example, indels of less than 50 nt, 100 nt, or 150 nt in an intronic region, even if occurring at both alleles of the gene, are not expected to disrupt expression of the functional protein. Because insertion may be a relatively low-frequency event, insertion of the nucleic acid encoding the heterologous protein (e.g., CAR molecule as described herein) may occur in most cells at only one allele of the gene targeted by the CRISPR system. Thus, without being bound by theory, targeting an intron with a CRISPR system may allow for targeted insertion of nucleic acid encoding a heterologous sequence (e.g., CAR molecule, e.g., as described herein) while preserving at least a portion of the expression and/or function of the gene, for example, through the allele which does not comprise the inserted nucleic acid sequence. In alternate embodiments, for example, using the gRNA molecules described herein may result in a high rate of incorporation of sequence of the template nucleic acid, and targeting an intron with a CRISPR system (e.g., as described herein) allows for targeted insertion of nucleic acid encoding a heterologous sequence (e.g., CAR molecule, e.g., as described herein) while disrupting the expression and/or function of both alleles of a gene. In an aspect, the cell is an immune effector cell, e.g., an NK cell or T cell. In an aspect, the cell is an autologous cell.

[0368] Thus, in an aspect, the disclosure provides a cell, e.g., an immune effector cell, e.g., an immune effector cell comprising a CAR molecule, comprising an indel at or near a first target, i.e., a molecule that regulates the expression of MHC II (e.g., HLA-DM, HLA-DO, HLA-DR, HLA-DQ, HLA-DP, CIITA, RFXANK, RFXAP, RFX1, RFX5, NF-YA, NF-YB, NF-YC, X2BP, or OCAB), and a second target, i.e., a component of the T cell system (e.g., TRAC, TRBC1, TRBC2, CD247, CD3, CD3D, CD3E, CD3G, DCK, CD52, FKBP1A, or NR3C1). In some embodiments, the cell further comprises an indel at or near a third target, i.e., a molecule that regulates the expression of MHC I (e.g. HLA-A, HLA-B, HLA-C, B2M, or NLRC5). In an aspect, the disclosure provides a cell, e.g., an immune effector cell, e.g., an immune effector cell comprising a CAR molecule, comprising an indel at or near a target sequence complementary to the targeting domain of a gRNA to a molecule that regulates the expression of MHC II and an indel at or near a target sequence complementary to the targeting domain of a gRNA to a component of the T cell system. In an aspect, the disclosure provides a cell, e.g., an immune effector cell, e.g., an immune effector cell comprising a CAR molecule, comprising nucleic acid sequence encoding a heterologous protein (e.g., a CAR molecule, e.g., described herein) integrated into the genome of said cell at or near a target sequence complementary to the targeting domain of a gRNA to a molecule that regulates the expression of MHC II and at or near a target sequence complementary to the targeting domain of a gRNA to a component of the T cell system. The disclosure further provides methods and compositions useful in connection with said cells.

[0369] In any of the aforementioned aspects and embodiments the cell is an autologous cell. Alternatively, in any of the aforementioned aspects and embodiments, the cell is an allogeneic cell. Examples of allogenic cells include those in which expression and/or function of a T cell receptor chain, for example, TRAC or TRBC, has been reduced or eliminated, for example using a genome editing system (e.g., CRISPR system) targeted to said gene. The cell may further comprise reduced or eliminated expression of one or more additional genes. In any of the aforementioned embodiments and aspects, the cell is or will be engineered to express a chimeric antigen receptor (CAR), e.g., as described herein. In any of the aforementioned aspects and embodiments, the cell is a T cell.

[0370] Additional features of the gene editing systems, gRNA molecules, the CRISPR systems, Cas9 molecules, cells, CAR molecules, methods and other aspects are described in detail below.

### Gene Editing Systems

[0371] In an aspect, the disclosure provides gene editing systems which target a plurality of targets, including a first target, i.e., a molecule that regulates the expression of MHC II and a second target, i.e., a component of the T cell system, and optionally a third target, i.e., a molecule that regulates the expression of MHC I. Exemplary sequences for the first target may be selected from the target sequences listed in Table 3. In other embodiments, the gene editing system target a subsequence of a target sequence listed in Table 3. In other embodiments, the gene editing system targets a sequence comprising all or a portion of a target sequence listed in Table 3. Exemplary sequences for the second target and the third target may be found in WO2017093969, the contents of which are hereby incorporated by reference in their entirety. Various gene editing systems are described more fully below.

[0372] In some embodiments, the disclosure provides gene editing systems comprising a template nucleic acid encoding a CAR and capable of integrating a CAR nucleic acid sequence such that CAR is expressed and/or a molecule that regulates MHC II expression and a component of a T cell system are partially, disrupted, fully disrupted, or modified.

### TALEN Gene Editing Systems

[0373] TALENs are produced artificially by fusing a TAL effector DNA binding domain to a DNA cleavage domain. Transcription activator-like effects (TALEs) can be engineered to bind any desired DNA sequence, including a first sequence of a molecule that regulates the expression of MHC II, e.g., a sequence within a sequence of Table 3, and a second sequence of a component of the T cell system, and optionally a third sequence of a molecule that regulates the expression of MHC I. By combining an engineered TALE with a DNA cleavage domain, a restriction enzyme can be produced which is specific to any desired DNA sequence, including a first sequence of a molecule that regulates the expression of MHC II and a second sequence of a component of the T cell system. These can then be introduced into a cell, wherein they can be used for genome editing. Boch (2011) Nature Biotech. 29: 135-6; and Boch et al. (2009) Science 326: 1509-12; Moscou et al. (2009) Science 326: 3501.

[0374] TALEs are proteins secreted by Xanthomonas bacteria. The DNA binding domain contains a repeated, highly conserved 33-34 amino acid sequence, with the exception of the 12th and 13th amino acids. These two positions are highly variable, showing a strong correlation with specific nucleotide recognition. They can thus be engineered to bind to a desired DNA sequence.

[0375] To produce a TALEN, a TALE protein is fused to a nuclease (N), which is, for example, a wild-type or mutated FokI endonuclease. Several mutations to FokI have been made for its use in TALENs; these, for example, improve cleavage specificity or activity. Cermak et al. (2011) Nucl. Acids Res. 39: e82; Miller et al. (2011) Nature Biotech. 29: 143-8; Hockemeyer et al. (2011) Nature Biotech. 29: 731-734; Wood et al. (2011) Science 333: 307; Doyon et al. (2010) Nature Methods 8: 74-79; Szczepek et al. (2007) Nature Biotech. 25: 786-793; and Guo et al. (2010) J. Mol. Biol. 200: 96.

[0376] The FokI domain functions as a dimer, requiring two constructs with unique DNA binding domains for sites in the target genome with proper orientation and spacing. Both the number of amino acid residues between the TALE DNA binding domain and the FokI cleavage domain and the number of bases between the two individual TALEN binding sites appear to be important parameters for achieving high levels of activity. Miller et al. (2011) Nature Biotech. 29: 143-8.

[0377] A TALEN to a plurality of sequences, including a first sequence of a molecule that regulates the expression of MHC II, e.g., a sequence within a sequence of Table 3, and a second sequence of a component of the T cell system, and optionally a third sequence of a molecule that regulates the expression of MHC I, can be used inside a cell to produce a double-stranded break (DSB). A mutation can be introduced at the break site if the repair mechanisms improperly repair the break via non-homologous end joining. For example, improper repair may introduce a frame shift mutation. Alternatively, template nucleic acid, e.g., as described herein, can be introduced into the cell along with the TALEN, e.g., template nucleic acid encoding a CAR, e.g., as described herein; depending on the sequences of the template nucleic acid and chromosomal sequence, this process can be used to integrate heterologous nucleic acid sequence, e.g., sequence encoding the CAR, e.g., as described herein, at or near the site targeted by the TALEN. Without being bound by theory, such integration may lead to the expression of the CAR as well as disruption, e.g., partial disruption, e.g., disruption of one or more functions, e.g., disruption of only one allele of each of a molecule that regulates the expression of MHC I, a component of the T cell system, and optionally a molecule that regulates the expression of MHC I.

[0378] TALENs specific to the sequences described herein can be constructed using any method known in the art, including various schemes using modular components. Zhang et al. (2011) Nature Biotech. 29: 149-53; Geibler et al. (2011) PLoS ONE 6: e19509: U.S. Pat. Nos. 8,420,782; 8,470,973, the contents of which are hereby incorporated by reference in their entirety.

### Zinc Finger Nuclease (“ZFN”) Gene Editing Systems

[0379] “ZFN” or “zinc finger nuclease” refers to an artificial nuclease which can be used to modify, e.g., delete one or more nucleic acids of, one or more desired nucleic acid sequences, e.g., a first sequence of a molecule that regulates the expression of MHC II, and a second sequence of a component of the T cell system, and optionally a third sequence of a molecule that regulates the expression of MHC I, e.g., a sequence listed in Table 3. Mutant and variant ZFNs are also encompassed.

[0380] Like a TALEN, a ZFN comprises a FokI nuclease domain (or derivative thereof) fused to a DNA-binding domain. In the case of a ZFN, the DNA-binding domain comprises one or more zinc fingers. Carroll et al. (2011) Genetics Society of America 188: 773-782; and Kim et al. (1996) Proc. Natl. Acad. Sci. USA 93: 1156-1160.

[0381] A zinc finger is a small protein structural motif stabilized by one or more zinc ions. A zinc finger can comprise, for example, Cys2His2, and can recognize an approximately 3-bp sequence. Various zinc fingers of known specificity can be combined to produce multi-finger polypeptides which recognize about 6, 9, 12, 15 or 18-bp sequences. Various selection and modular assembly techniques are available to generate zinc fingers (and combinations thereof) recognizing specific sequences, including phage display, yeast one-hybrid systems, bacterial one-hybrid and two-hybrid systems, and mammalian cells.

[0382] Like a TALEN, a ZFN must dimerize to cleave DNA. Thus, a pair of ZFNs are required to target non-palindromic DNA sites. The two individual ZFNs must bind opposite strands of the DNA with their nucleases properly spaced apart. Bitinaite et al. (1998) Proc. Natl. Acad. Sci. USA 95: 10570-5.

[0383] Also like a TALEN, a ZFN can create a double-stranded break in the DNA, which can create a frame-shift mutation if improperly repaired, leading to a decrease in the expression and/or function, e.g., one or more functions, of a molecule that regulates the expression of MHC II and/or a component of the T cell system in a cell. ZFNs can also be used with homologous recombination to mutate, or to introduce nucleic acid, e.g., encoding a CAR, at or near a site of the target sequence. As discussed above, the nucleic acid encoding a CAR may be introduced as part of a template nucleic acid. In embodiments, the template nucleic acid further comprises homology arms 5′ to, 3′ to, or both 5′ and 3′ to the nucleic acid of the template nucleic acid which encodes the molecule or molecules of interest (e.g., which encodes a CAR described herein), wherein said homology arms are complementary to genomic DNA sequence flanking the target sequence.

[0384] ZFNs specific to sequences in a first target, i.e., a molecule that regulates the expression of MHC II, e.g., a sequence of Table 3, and a second target, i.e., a component of the T cell system, and optionally a third target, i.e., a molecule that regulates the expression of MHC I can be constructed using any method known in the art. See, e.g., Provasi (2011) Nature Med. 18: 807-815; Torikai (2013) Blood 122: 1341-1349; Cathomen et al. (2008) Mol. Ther. 16: 1200-7; and Guo et al. (2010) J. Mol. Biol. 400: 96; U.S. Patent Publication 2011/0158957; and U.S. Patent Publication 2012/0060230, the contents of which are hereby incorporated by reference in their entirety. In embodiments, The ZFN gene editing system may also comprise nucleic acid encoding one or more components of the ZFN gene editing system, e.g., a ZFN gene editing system targeted to a first sequence of a molecule that regulates the expression of MHC II, e.g., a sequence listed in Table 3, and a second sequence of a component of the T cell system.

### CRISPR Gene Editing Systems

[0385] In a preferred aspect, the gene editing system is a CRISPR system. Additional features of the gRNA molecules, the CRISPR systems, Cas9 molecules, cells, CAR molecules, methods and other aspects are described in detail below.

I. gRNA Molecules

[0386] A gRNA molecule may have a number of domains, as described more fully below. In some embodiments, a gRNA molecule comprises a targeting domain and interacts with a Cas molecule, such as Cas9. In some embodiments, a gRNA molecule comprises a crRNA domain (comprising a targeting domain) and a tracr. In embodiments, the crRNA and the tracr are provided on a single contiguous polynucleotide molecule. In other embodiments, the crRNA and the tracr are provided on separate polynucleotide molecules, which are themselves capable of association, e.g., through non-covalent hybridization. The gRNA molecules, used as a component of a CRISPR system, are useful for modifying (e.g., modifying the sequence) DNA at or near a target site. Such modifications include deletions and or insertions that result in, for example, reduced or eliminated expression of a functional product of the gene comprising the target site. Such modifications can also include insertion of heterologous nucleic acid sequence, for example, nucleic acid sequence encoding a heterologous protein (e.g., a CAR molecule, e.g., as described herein), that may be provided to said cell as a template nucleic acid, as described herein. In some embodiments, the inserted heterologous nucleic acid also serves to eliminate expression of the functional product of the gene comprising the target site. In some embodiments, a separate gRNA molecule and CRISPR system are used to eliminate expression of the functional product of the gene comprising the target site before, at the same time as, or after the insertion of the heterologous nucleic acid. These uses, and others, are described more fully below.

[0387] In an embodiment, a unimolecular, or sgRNA comprises, preferably from 5′ to 3′: a crRNA (which comprises a targeting domain complementary to a target sequence and a region that forms part of a flagpole (i.e., a crRNA flagpole region)); optionally a loop; and a tracr (which comprises a domain complementary to the crRNA flagpole region, and a domain which additionally binds a nuclease or other effector molecule, e.g., a Cas molecule, e.g., a Cas9 molecule), and may take the following format (from 5′ to 3′):

[0388] [targeting domain]-[crRNA flagpole region]-[optional first flagpole extension]-[optional loop]-[optional first tracr extension]-[tracr flagpole region]-[tracr nuclease binding domain].

[0389] In embodiments, the tracr nuclease binding domain binds to a Cas protein, e.g., a Cas9 protein.

[0390] In an embodiment, a bimolecular, or dgRNA comprises two polynucleotides; the first, preferably from 5′ to 3: a crRNA (which contains a targeting domain complementary to a target sequence and a region that forms part of a flagpole; and the second, preferably from 5′ to 3′: a tracr (which contains a domain complementary to the crRNA flagpole region, and a domain which additionally binds a nuclease or other effector molecule, e.g., a Cas molecule, e.g., Cas9 molecule), and may take the following format (from 5′ to 3′):

[0391] Polynucleotide 1 (crRNA): [targeting domain]-[crRNA flagpole region]-[optional first flagpole extension]-[optional second flagpole extension]

[0392] Polynucleotide 2 (tracr): [optional first tracr extension]-[tracr flagpole region]-[tracr nuclease binding domain]

[0393] In embodiments, the dgRNA comprises two polynucleotides that are covalently linked by nonnucleotide linkers as described in, e.g., He et al., ChemBioChem 2016, 17, 1809-1812. In some embodiments a click chemistry reaction is used to link the two polynucleotides, for example using a copper(I)-catalyzed alkyne-azide cycloaddition (CuAAC) reaction (see He et al., ChemBioChem 2016, 17, 1809-1812), or through a strain-promoted azide-alkyne cyloaddition (SPAAC) (see US 2016/0215275 A1), both of which are incorporated herein by reference in their entirety. In another embodiment, the two polynucleotides are covalently linked via a thio-ether linker, which can be generated, for example, by reaction between thiol and maleimide functional groups, or by reaction between other functional groups (see, e.g., US 2016/0215275 A1). In yet other embodiments, the nonnucleotide linker can comprise a carbamate, ether, ester, amide, imine, amidine, aminotrizine, hydrozone, disulfide, thioester, phosphorothioate, phosphorodithioate, sulfonamide, sulfonate, fulfone, sulfoxide, urea, thiourea, hydrazide, oxime, photolabile linkage, or C—C bond forming group such as a Diels-Alder cyclo-addition pair and/or a ring-closing metathesis pair, and/or a Michael reaction pair (see WO 2016/18745 A1, incorporated herein by reference in its entirety).

[0394] In some aspects, the targeting domain comprises or consists of a targeting domain sequence described herein, e.g., a targeting domain described in Tables 1a-c, or a targeting domain comprising or consisting of 17, 18, 19, or 20 (preferably 20) consecutive nucleotides of a targeting domain sequence described in Tables 1a-c.

[0395] In some aspects, the flagpole, e.g., the crRNA flagpole region, comprises, from 5′ to 3′: GUUUUAGAGCUA (SEQ ID NO: 50).

[0396] In some aspects, the flagpole, e.g., the crRNA flagpole region, comprises, from 5′ to 3′: GUUUAAGAGCUA (SEQ ID NO: 51).

[0397] In some aspects the loop comprises, from 5′ to 3′: GAAA (SEQ ID NO: 52).

[0398] In some aspects the tracr comprises, from 5′ to 3′: UAGCAAGUUAAAAUAAGGCUAGUCCGUUAUCAACUUGAAAAAGUGGCACCGAGUCGG UGC (SEQ ID NO: 53) and is preferably used in a gRNA molecule comprising SEQ ID NO: 50.

[0399] In some aspects the tracr comprises, from 5′ to 3′: UAGCAAGUUUAAAUAAGGCUAGUCCGUUAUCAACUUGAAAAAGUGGCACCGAGUCGG UGC (SEQ ID NO: 54) and is preferably used in a gRNA molecule comprising SEQ ID NO: 51.

[0400] In some aspects, the gRNA may also comprise, at the 3′ end, additional U nucleic acids. For example the gRNA may comprise an additional 1, 2, 3, 4, 5, 6, 7, 8, 9, or 10 U nucleic acids at the 3′ end (SEQ ID NO: 58). In an embodiment, the gRNA comprises an additional 4 U nucleic acids at the 3′ end. In the case of dgRNA, one or more of the polynucleotides of the dgRNA (e.g., the polynucleotide comprising the targeting domain and the polynucleotide comprising the tracr) may comprise, at the 3′ end, additional U nucleic acids. For example, the case of dgRNA, one or more of the polynucleotides of the dgRNA (e.g., the polynucleotide comprising the targeting domain and the polynucleotide comprising the tracr) may comprise an additional 1, 2, 3, 4, 5, 6, 7, 8, 9, or 10 U nucleic acids at the 3′ end (SEQ ID NO: 58). In an embodiment, in the case of dgRNA, one or more of the polynucleotides of the dgRNA (e.g., the polynucleotide comprising the targeting domain and the polynucleotide comprising the tracr) comprises an additional 4 U nucleic acids at the 3′ end. In an embodiment of a dgRNA, only the polynucleotide comprising the tracr comprises the additional U nucleic acid(s), e.g., 4 U nucleic acids. In an embodiment of a dgRNA, only the polynucleotide comprising the targeting domain comprises the additional U nucleic acid(s). In an embodiment of a dgRNA, both the polynucleotide comprising the targeting domain and the polynucleotide comprising the tracr comprise the additional U nucleic acids, e.g., 4 U nucleic acids.

[0401] In some aspects, the gRNA may also comprise, at the 3′ end, additional A nucleic acids. For example the gRNA may comprise an additional 1, 2, 3, 4, 5, 6, 7, 8, 9, or 10 A nucleic acids at the 3′ end (SEQ ID NO: 59). In an embodiment, the gRNA comprises an additional 4 A nucleic acids at the 3′ end. In the case of dgRNA, one or more of the polynucleotides of the dgRNA (e.g., the polynucleotide comprising the targeting domain and the polynucleotide comprising the tracr) may comprise, at the 3′ end, additional A nucleic acids. For example, the case of dgRNA, one or more of the polynucleotides of the dgRNA (e.g., the polynucleotide comprising the targeting domain and the polynucleotide comprising the tracr) may comprise an additional 1, 2, 3, 4, 5, 6, 7, 8, 9, or 10 A nucleic acids at the 3′ end (SEQ ID NO: 59). In an embodiment, in the case of dgRNA, one or more of the polynucleotides of the dgRNA (e.g., the polynucleotide comprising the targeting domain and the polynucleotide comprising the tracr) comprises an additional 4 A nucleic acids at the 3′ end. In an embodiment of a dgRNA, only the polynucleotide comprising the tracr comprises the additional A nucleic acid(s), e.g., 4 A nucleic acids. In an embodiment of a dgRNA, only the polynucleotide comprising the targeting domain comprises the additional A nucleic acid(s). In an embodiment of a dgRNA, both the polynucleotide comprising the targeting domain and the polynucleotide comprising the tracr comprise the additional U nucleic acids, e.g., 4 A nucleic acids.

[0402] In embodiments, one or more of the polynucleotides of the gRNA molecule may comprise a cap at the 5′ end.

[0403] In an embodiment, a unimolecular, or sgRNA comprises, preferably from 5′ to 3′: a crRNA (which contains a targeting domain complementary to a target sequence; a crRNA flagpole region; first flagpole extension; a loop; a first tracr extension (which contains a domain complementary to at least a portion of the first flagpole extension); and a tracr (which contains a domain complementary to the crRNA flagpole region, and a domain which additionally binds a Cas9 molecule). In some aspects, the targeting domain comprises a targeting domain sequence described herein, e.g., a targeting domain described in Tables 1a-c, or a targeting domain comprising or consisting of 17, 18, 19, 20 (preferably 20) consecutive nucleotides of a targeting domain sequence described in Tables 1a-c, for example the 3′ 17, 18, 19 or 20 (preferably 20) consecutive nucleotides of a targeting domain sequence described in Tables 1a-c. In embodiments, the 17, 18, 19, 20 (preferably 20) consecutive nucleotides of a targeting domain sequence described in Tables 1a-c are the 3′ 17, 18, 19, 20 (preferably 20) consecutive nucleotides of a targeting domain sequence described in Tables 1a-c. In embodiments, the 17, 18, 19, 20 (preferably 20) consecutive nucleotides of a targeting domain sequence described in Tables 1a-c are the 5′ 17, 18, 19, 20 (preferably 20) consecutive nucleotides of a targeting domain sequence described in Tables 1a-c.

[0404] In aspects comprising a first flagpole extension and/or a first tracr extension, the flagpole, loop and tracr sequences may be as described above. In general any first flagpole extension and first tracr extension may be employed, provided that they are complementary. In embodiments, the first flagpole extension and first tracr extension consist of 3, 4, 5, 6, 7, 8, 9, 10 or more complementary nucleotides.

[0405] In some aspects, the first flagpole extension comprises, from 5′ to 3′: UGCUG (SEQ ID NO: 55). In some aspects, the first flagpole extension consists of SEQ ID NO: 55.

[0406] In some aspects, the first tracr extension comprises, from 5′ to 3′: CAGCA (SEQ ID NO: 56). In some aspects, the first tracr extension consists of SEQ ID NO: 56.

[0407] In an embodiment, a dgRNA comprises two nucleic acid molecules. In some aspects, the dgRNA comprises a first nucleic acid which contains, preferably from 5′ to 3′: a targeting domain complementary to a target sequence; a crRNA flagpole region; optionally a first flagpole extension; and, optionally, a second flagpole extension; and a second nucleic acid (which may be referred to herein as a tracr), and comprises at least a domain which binds a Cas molecule, e.g., a Cas9 molecule) comprising preferably from 5′ to 3′: optionally a first tracr extension; and a tracr (which contains a domain complementary to the crRNA flagpole region, and a domain which additionally binds a Cas, e.g., Cas9, molecule). The second nucleic acid may additionally comprise, at the 3′ end (e.g., 3′ to the tracr) additional U nucleic acids. For example the tracr may comprise an additional 1, 2, 3, 4, 5, 6, 7, 8, 9, or 10 U nucleic acids at the 3′ end (e.g., 3′ to the tracr) (SEQ ID NO: 58). The second nucleic acid may additionally or alternately comprise, at the 3′ end (e.g., 3′ to the tracr) additional A nucleic acids. For example the tracr may comprise an additional 1, 2, 3, 4, 5, 6, 7, 8, 9, or 10 A nucleic acids at the 3′ end (e.g., 3′ to the tracr) (SEQ ID NO: 59). In some aspects, the targeting domain comprises a targeting domain sequence described herein, e.g., a targeting domain described in Tables 1a-c, or a targeting domain comprising or consisting of 17, 18, 19, or 20 (preferably 20) consecutive nucleotides of a targeting domain sequence described in Tables 1a-c.

[0408] In aspects involving a dgRNA, the crRNA flagpole region, optional first flagpole extension, optional first tracr extension and tracr sequences may be as described above.

[0409] In some aspects, the optional second flagpole extension comprises, from 5′ to 3′: UUUUG (SEQ ID NO: 57).

[0410] In embodiments, the 3′ 1, 2, 3, 4, or 5 nucleotides, the 5′ 1, 2, 3, 4, or 5 nucleotides, or both the 3′ and 5′ 1, 2, 3, 4, or 5 nucleotides of the gRNA molecule (and in the case of a dgRNA molecule, the polynucleotide comprising the targeting domain and/or the polynucleotide comprising the tracr) are modified nucleic acids, as described more fully in section XII, below.

[0411] The domains are discussed briefly below:

### 1) The Targeting Domain:

[0412] Guidance on the selection of targeting domains can be found, e.g., in Fu Y el al. NAT BIOTECHNOL 2014 (doi: 10.1038/nbt.2808) and Sternberg S H el al. NATURE 2014 (doi: 10.1038/naturel3011).

[0413] The targeting domain comprises a nucleotide sequence that is complementary, e.g., at least 80, 85, 90, 95, or 99% complementary, or e.g., fully complementary, to the target sequence on the target nucleic acid. The targeting domain is part of an RNA molecule and will therefore comprise the base uracil (U), while any DNA encoding the gRNA molecule will comprise the base thymine (T). While not wishing to be bound by theory, it is believed that the complementarity of the targeting domain with the target sequence contributes to specificity of the interaction of the gRNA molecule/Cas9 molecule complex with a target nucleic acid. It is understood that in a targeting domain and target sequence pair, the uracil bases in the targeting domain will pair with the adenine bases in the target sequence.

[0414] In an embodiment, the targeting domain is 5 to 50, e.g., 10 to 40, e.g., 10 to 30, e.g., 15 to 30, e.g., 15 to 25 nucleotides in length. In an embodiment, the targeting domain is 15, 16, 17, 18, 19, 20, 21, 22, 23, 24 or 25 nucleotides in length. In an embodiment, the targeting domain is 16 nucleotides in length. In an embodiment, the targeting domain is 17 nucleotides in length. In an embodiment, the targeting domain is 18 nucleotides in length. In an embodiment, the targeting domain is 19 nucleotides in length. In an embodiment, the targeting domain is 20 nucleotides in length. In an embodiment, the targeting domain is 21 nucleotides in length. In an embodiment, the targeting domain is 22 nucleotides in length. In an embodiment, the targeting domain is 23 nucleotides in length. In an embodiment, the targeting domain is 24 nucleotides in length. In an embodiment, the targeting domain is 25 nucleotides in length. In embodiments, the aforementioned 16, 17, 18, 19, or 20 nucleotides comprise the 5′—16, 17, 18, 19 or 20 nucleotides from a targeting domain described in Tables 1a-c. In embodiments, the aforementioned 16, 17, 18, 19, or 20 nucleotides comprise the 3′—16, 17, 18, 19 or 20 nucleotides from a targeting domain described in Tables 1a-c. In embodiments, the aforementioned 16, 17, 18, 19, or 20 nucleotides consist of the 3′—16, 17, 18, 19 or 20 nucleotides from a targeting domain described in Tables 1a-c. In embodiments, the targeting domain consists of a targeting domain described in Tables 1a-c.

[0415] Without being bound by theory, it is believed that the 8, 9 or 10 nucleic acids of the targeting domain disposed at the 3′ end of the targeting domain may be important for targeting the target sequence, and may thus be referred to as the “core” region of the targeting domain. In an embodiment, the core domain is fully complementary with the target sequence.

[0416] The strand of the target nucleic acid with which the targeting domain is complementary is referred to herein as the target sequence. In some aspects, the target sequence is disposed on a chromosome, e.g., is a target within a gene. In some aspects the target sequence is disposed within an exon of a gene. In some aspects the target sequence is disposed within an intron of a gene. In some aspects the target sequence is disposed within an intron-exon junction of a gene. In some aspects, the target sequence comprises, or is proximal (e.g., within 10, 20, 30, 40, 50, 100, 200, 300, 400, 500, or 1000 nucleic acids) to a binding site of a regulatory element, e.g., a promoter or transcription factor binding site, of a gene of interest. Some or all of the nucleotides of the targeting domain can have a modification, e.g., modification found in Section XII herein.

2) crRNA Flagpole Region:

[0417] The flagpole comprises a portion of gRNA in which the crRNA and the tracr bind or hybridize to one another. The crRNA flagpole region is complementary with a portion of the tracr, and in an embodiment, has sufficient complementarity to a portion of the tracr to form a duplexed region under at least some physiological conditions, for example, normal physiological conditions. In an embodiment, the crRNA flagpole region is 5 to 30 nucleotides in length. In an embodiment, the crRNA flagpole region is 5 to 25 nucleotides in length. The crRNA flagpole region can share homology with, or be derived from, a naturally occurring portion of the repeat sequence from a bacterial CRISPR system. In an embodiment, it has at least 50% homology with a crRNA flagpole region disclosed herein, e.g., an S. pyogenes, or S. thermophilus, crRNA flagpole region.

[0418] In an embodiment, the flagpole, e.g., the crRNA flagpole region, comprises SEQ ID NO: 50. In an embodiment, the flagpole, e.g., the crRNA flagpole region, consists of SEQ ID NO: 50. In an embodiment, the flagpole, e.g., the crRNA flagpole region, comprises sequence having at least 50%, 60%, 70%, 80%, 85%, 90%, 95% or 99% homology with SEQ ID NO: 50. In an embodiment, the flagpole, e.g., the crRNA flagpole region, comprises at least 5, 6, 7, 8, 9, 10, or 11 nucleotides of SEQ ID NO: 50. In an embodiment, the flagpole, e.g., the crRNA flagpole region, comprises SEQ ID NO: 51. In an embodiment, the flagpole, e.g., the crRNA flagpole region, consists of SEQ ID NO: 51. In an embodiment, the flagpole comprises sequence having at least 50%, 60%, 70%, 80%, 85%, 90%, 95% or 99% homology with SEQ ID NO: 51. In an embodiment, the flagpole, e.g., the crRNA flagpole region, comprises at least 5, 6, 7, 8, 9, 10, or 11 nucleotides of SEQ ID NO: 51.

[0419] Some or all of the nucleotides of the domain can have a modification, e.g., modification described in Section XII herein.

### 3) First Flagpole Extension

[0420] When a tracr comprising a first tracr extension is used, the crRNA may comprise a first flagpole extension. In general any first flagpole extension and first tracr extension may be employed, provided that they are complementary. In embodiments, the first flagpole extension and first tracr extension consist of 3, 4, 5, 6, 7, 8, 9, 10 or more complementary nucleotides.

[0421] The first flagpole extension may comprise nucleotides that are complementary, e.g., 80%, 85%, 90%, 95% or 99%, e.g., fully complementary, with nucleotides of the first tracr extension. In some aspects, the first flagpole extension nucleotides that hybridize with complementary nucleotides of the first tracr extension are contiguous. In some aspects, the first flagpole extension nucleotides that hybridize with complementary nucleotides of the first tracr extension are discontinuous, e.g., comprises two or more regions of hybridization separated by nucleotides that do not base pair with nucleotides of the first tracr extension. In some aspects, the first flagpole extension comprises at least 2, 3, 4, 5, 6, 7, 8, 9, 10, 11, 12, 13, 14, 15, 16, 17, 18, 19, 20 or more nucleotides. In some aspects, the first flagpole extension comprises, from 5′ to 3′: UGCUG (SEQ ID NO: 55). In some aspects, the first flagpole extension consists of, from 5′ to 3′: UGCUG (SEQ ID NO: 55). In some aspects, the first flagpole extension consists of SEQ ID NO: 55. In some aspects the first flagpole extension comprises nucleic acid that is at least 80%, 85%, 90%, 95% or 99% homology to SEQ ID NO: 55.

[0422] Some or all of the nucleotides of the first tracr extension can have a modification, e.g., modification found in Section XII herein.

### 3) The Loop

[0423] In some embodiments, a gRNA can include a loop. A loop can serve to link the crRNA flagpole region (or optionally the first flagpole extension, when present) with the tracr (or optionally the first tracr extension, when present) of a sgRNA. The loop can link the crRNA flagpole region and tracr covalently or non-covalently. In an embodiment, the linkage is covalent. In an embodiment, the loop covalently couples the crRNA flagpole region and tracr. In an embodiment, the loop covalently couples the first flagpole extension and the first tracr extension. In an embodiment, the loop is, or comprises, a covalent bond interposed between the crRNA flagpole region and the domain of the tracr which hybridizes to the crRNA flagpole region. Typically, the loop comprises one or more, e.g., 2, 3, 4, 5, 6, 7, 8, 9, or 10 nucleotides.

[0424] In dgRNA molecules, the two molecules can be associated by virtue of the hybridization between at least a portion of the crRNA (e.g., the crRNA flagpole region) and at least a portion of the tracr (e.g., the domain of the tracr which is complementary to the crRNA flagpole region). In some embodiments, the crRNA and tracr are covalently linked via a nonnucleotide chemical linker.

[0425] A wide variety of loops are suitable for use in sgRNAs. Loops can consist of a covalent bond, or be as short as one or a few nucleotides, e.g., 1, 2, 3, 4, or 5 nucleotides in length. In an embodiment, a loop is 2, 3, 4, 5, 6, 7, 8, 9, 10, 15, 20, or 25 or more nucleotides in length. In an embodiment, a loop is 2 to 50, 2 to 40, 2 to 30, 2 to 20, 2 to 10, or 2 to 5 nucleotides in length. In an embodiment, a loop shares homology with, or is derived from, a naturally occurring sequence. In an embodiment, the loop has at least 50% homology with a loop disclosed herein. In an embodiment, the loop comprises SEQ ID NO: 52. In an embodiment, the loop consists of SEQ ID NO: 52.

[0426] Some or all of the nucleotides of the domain can have a modification, e.g., modification described in Section XII herein.

### 4) The Second Flagpole Extension

[0427] In an embodiment, a dgRNA can comprise additional sequence, 3′ to the crRNA flagpole region or, when present, the first flagpole extension, referred to herein as the second flagpole extension. In an embodiment, the second flagpole extension is 2-10, 2-9, 2-8, 2-7, 2-6, 2-5, or 2-4 nucleotides in length. In an embodiment, the second flagpole extension is 2, 3, 4, 5, 6, 7, 8, 9, or 10 or more nucleotides in length. In an embodiment, the second flagpole extension comprises SEQ ID NO: 57. In an embodiment, the second flagpole extension consists of SEQ ID NO: 57.

### 5) The Tracr

[0428] The tracr is a nucleic acid sequence that can provide for nuclease, e.g., Cas9, binding. Without being bound by theory, it is believed that each Cas9 species is associated with a particular tracr sequence. Tracr sequences are utilized in both sgRNA and in dgRNA systems. The exemplary gRNA targeting domain sequences provided in Tables 1a-c may be utilized in both sgRNA and in dgRNA systems.

[0429] In an embodiment, the tracr comprises sequence from, or derived from, an S. pyogenes tracr. See Jinek et al. (2012). In some aspects, the tracr has a portion that hybridizes to the flagpole portion of the crRNA, e.g., it has sufficient complementarity to the crRNA flagpole region to form a duplexed region under at least some physiological conditions (sometimes referred to herein as the tracr flagpole region or a tracr domain complementary to the crRNA flagpole region). In embodiments, the domain of the tracr that hybridizes with the crRNA flagpole region comprises at least 5, 6, 7, 8, 9, 10, 11, 12, 13, 14, 15, 16, 17, 18, 19, or 20 nucleotides that hybridize with complementary nucleotides of the crRNA flagpole region. In some aspects, the tracr nucleotides that hybridize with complementary nucleotides of the crRNA flagpole region are contiguous. In some aspects, the tracr nucleotides that hybridize with complementary nucleotides of the crRNA flagpole region are discontinuous, e.g., comprises two or more regions of hybridization separated by nucleotides that do not base pair with nucleotides of the crRNA flagpole region. In some aspects, the portion of the tracr that hybridizes to the crRNA flagpole region comprises, from 5′ to 3′: UAGCAAGUUAAAA (SEQ ID NO: 61). In some aspects, the portion of the tracr that hybridizes to the crRNA flagpole region comprises, from 5′ to 3′: UAGCAAGUUUAAA (SEQ ID NO: 62). In embodiments, the sequence that hybridizes with the crRNA flagpole region is disposed on the tracr 5′—to the sequence of the tracr that additionally binds a nuclease, e.g., a Cas molecule, e.g., a Cas9 molecule.

[0430] The tracr further comprises a domain that additionally binds to a nuclease, e.g., a Cas molecule, e.g., a Cas9 molecule. Without being bound by theory, it is believed that Cas9 from different species bind to different tracr sequences. In some aspects, the tracr comprises a sequence that binds to a S. pyogenes Cas9 molecule. See Jinek et al. (2012). In some aspects, the tracr comprises sequence that binds to a Cas9 molecule disclosed herein. In some aspects, the domain that additionally binds a Cas9 molecule comprises, from 5′ to 3′: UAAGGCUAGUCCGUUAUCAACUUGAAAAAGUGGCACCGAGUCGGUGC (SEQ ID NO: 63). In some aspects the domain that additionally binds a Cas9 molecule comprises, from 5′ to 3′: UAAGGCUAGUCCGUUAUCAACUUGAAAAAGUGGCACCGAGUCGGUGCUUUU (SEQ ID NO: 64).

[0431] In some embodiments, the tracr comprises SEQ ID NO: 53. In some embodiments, the tracr comprises SEQ ID NO: 54. In some embodiments, the tracr consists of SEQ ID NO: 53. In some embodiments, the tracr consists of SEQ ID NO: 54.

[0432] Some or all of the nucleotides of the tracr can have a modification, e.g., modification found in Section XII herein.

[0433] In embodiments, the gRNA or any of the gRNA components described above comprises an inverted abasic residue at the 5′ end, the 3′ end or both the 5′ and 3′ end (e.g., in the sgRNA or in the tracr and/or crRNA of a dgRNA). In embodiments, the gRNA or any of the gRNA components described above comprises one or more phosphorothioate bonds. For example, the one or more phosphorothioate bonds can be between residues at the 5′ end of the polynucleotide, for example, a phosphorthioate bond between the first two 5′ residues, between each of the first three 5′ residues, between each of the first four 5′ residues, or between each of the first five 5′ residues (e.g., in the sgRNA or in the tracr and/or crRNA of a dgRNA). In embodiments, the gRNA or gRNA component may alternatively or additionally comprise one or more phosphorothioate bonds between residues at the 3′ end of the polynucleotide, for example, a phosphorthioate bond between the first two 3′ residues, between each of the first three 3′ residues, between each of the first four 3′ residues, or between each of the first five 3′ residues. In an embodiment, the gRNA or gRNA component comprises a phosphorothioate bond between each of the first four 5′ residues (e.g., comprises or consists of three phosphorothioate bonds at the 5′ end(s)), and a phosphorothioate bond between each of the first four 3′ residues (e.g., comprises or consists of three phosphorothioate bonds at the 3′ end(s)). In an embodiment, any of the phosphorothioate modifications described above can be combined with an inverted abasic residue at the 5′ end, the 3′ end, or both the 5′ and 3′ ends of the polynucleotide. In such embodiments, the inverted abasic nucleotide may be linked to the 5′ and/or 3′ nucleotide by a phosphate bond or a phosphorothioate bond.

[0434] In embodiments, the gRNA or a gRNA component described above comprises one or more nucleotides that include a 2′ O-methyl modification. In embodiments, each of the first 1, 2, 3, or more of the 5′ residues comprise a 2′ O-methyl modification. In embodiments, each of the first 1, 2, 3, or more of the 3′ residues comprise a 2′ O-methyl modification. In embodiments, the 4^{th}-to-terminal, 3^{rd}-to-terminal, and 2^{nd}-to-terminal 3′ residues comprise a 2′ O-methyl modification. In embodiments, each of the first 1, 2, 3 or more of the 5′ residues comprise a 2′ O-methyl modification, and each of the first 1, 2, 3 or more of the 3′ residues comprise a 2′ O-methyl modification. In an embodiment, each of the first 3 of the 5′ residues comprise a 2′ O-methyl modification, and each of the first 3 of the 3′ residues comprise a 2′ O-methyl modification. In embodiments, each of the first 3 of the 5′ residues comprise a 2′ O-methyl modification, and the 4^{th}-to-terminal, 3^{rd}-to-terminal, and 2^{nd}-to-terminal 3′ residues comprise a 2′ O-methyl modification. In embodiments, any of the 2′ O-methyl modifications described above may be combined with one or more phosphorothioate modifications, e.g., as described above, and/or one or more inverted abasic modifications, e.g., as described above.

[0435] In an embodiment, the gRNA or any of the gRNA components described above comprises a phosphorothioate bond between each of the first four 5′ residues (e.g., comprises three phosphorothioate bonds at the 5′ end of the polynucleotide(s)), a phosphorothioate bond between each of the first four 3′ residues (e.g., comprises, e.g., consists of three phosphorothioate bonds at the 5′ end of the polynucleotide(s)), a 2′ O-methyl modification at each of the first three 5′ residues, and a 2′ O-methyl modification at each of the first three 3′ residues. In an embodiment, the gRNA (e.g., the sgRNA or the tracr and/or crRNA of a dgRNA), e.g., any of the gRNA or gRNA components described above, comprises or consists of a phosphorothioate bond between each of the first four 5′ residues (e.g., comprises, e.g., consists of three phosphorothioate bonds at the 5′ end of the polynucleotide(s)), a phosphorothioate bond between each of the first four 3′ residues (e.g., comprises, e.g., consists of three phosphorothioate bonds at the 5′ end of the polynucleotide(s)), a 2′ O-methyl modification at each of the first three 5′ residues, and a 2′ O-methyl modification at each of the 4^{th}-to-terminal, 3^{rd}-to-terminal, and 2^{nd}-to-terminal 3′ residues.

[0436] In an embodiment, the gRNA or any of the gRNA components described above comprises a phosphorothioate bond between each of the first four 5′ residues (e.g., comprises three phosphorothioate bonds at the 5′ end of the polynucleotide(s)), a phosphorothioate bond between each of the first four 3′ residues (e.g., comprises, e.g., consists of three phosphorothioate bonds at the 5′ end of the polynucleotide(s)), a 2′ O-methyl modification at each of the first three 5′ residues, a 2′ O-methyl modification at each of the first three 3′ residues, and an additional inverted abasic residue at each of the 5′ and 3′ ends.

[0437] In an embodiment, the gRNA or any of the gRNA components described above, comprises a phosphorothioate bond between each of the first four 5′ residues (e.g., comprises three phosphorothioate bonds at the 5′ end of the polynucleotide(s)), a phosphorothioate bond between each of the first four 3′ residues (e.g., comprises, e.g., consists of three phosphorothioate bonds at the 5′ end of the polynucleotide(s)), a 2′ O-methyl modification at each of the first three 5′ residues, and a 2′ O-methyl modification at each of the 4^{th}-to-terminal, 3^{rd}-to-terminal, and 2^{nd}-to-terminal 3′ residues, and an additional inverted abasic residue at each of the 5′ and 3′ ends.

[0438] Specific embodiments of gRNA molecules are described in detail below. Although each is shown with 20 nucleic acid residues of the targeting domain (N's in each of the sequences below), it will be understood that the targeting domain may comprise or consist of 5-50 residues, e.g., 15-30 residues, e.g., 15-25 residues, e.g., 15, 16, 17, 18, 19, 20, 21, 22, 23, 24, or 25 residues. In embodiments, the gRNA is a dgRNA and comprises or consists of:

crRNA:

[0439] mN*mN*mN*NNNNNNNNNNNNNNNNNGUUUUAGAGCUAU*mG*mC*mU (SEQ ID NO: 66), where m indicates a base with 2′ O-Methyl modification, * indicates a phosphorothioate bond, and N's indicate the residues of the targeting domain, e.g., as described herein (optionally with an inverted abasic residue at the 5′ and/or 3′ terminus); and

tracr:

[0440] AACAGCAUAGCAAGUUAAAAUAAGGCUAGUCCGUUAUCAACUUGAAAAAGU GGCACCGAGUCGGUGCUUUUUUU (SEQ ID NO: 65) (optionally with an inverted abasic residue at the 5′ and/or 3′ terminus).

[0441] In embodiments, the gRNA is a dgRNA and comprises or consists of:

crRNA:

[0442] mN*mN*mN*NNNNNNNNNNNNNNNNNGUUUUAGAGCUAU*mG*mC*mU (SEQ ID NO: 66), where m indicates a base with 2′O-Methyl modification, * indicates a phosphorothioate bond, and N's indicate the residues of the targeting domain, e.g., as described herein, (optionally with an inverted abasic residue at the 5′ and/or 3′ terminus); and

tracr:

[0443] mA*mA*mC*AGCAUAGCAAGUUAAAAUAAGGCUAGUCCGUUAUCAACUUGAA AAAGUGGCACCGAGUCGGUGCUUUU*mU*mU*mU (SEQ ID NO: 67), where m indicates a base with 2′O-Methyl modification, * indicates a phosphorothioate bond, and N's indicate the residues of the targeting domain (optionally with an inverted abasic residue at the 5′ and/or 3′ terminus).

[0444] In embodiments, the gRNA is a dgRNA and comprises, e.g., consists of:

crRNA:

[0445] mN*mN*mN*NNNNNNNNNNNNNNNNNGUUUUAGAGCUAUGCUGUU*mU*mU* mG (SEQ ID NO: 68), where m indicates a base with 2′O-Methyl modification, * indicates a phosphorothioate bond, and N's indicate the residues of the targeting domain, e.g., as described herein, (optionally with an inverted abasic residue at the 5′ and/or 3′ terminus); and

tracr:

[0446] AACAGCAUAGCAAGUUAAAAUAAGGCUAGUCCGUUAUCAACUUGAAAAAGU GGCACCGAGUCGGUGCUUUUUUU (SEQ ID NO: 65) (optionally with an inverted abasic residue at the 5′ and/or 3′ terminus).

[0447] In embodiments, the gRNA is a dgRNA and comprises or consists of:

crRNA:

[0448] mN*mN*mN*NNNNNNNNNNNNNNNNNGUUUUAGAGCUAUGCUGUU*mU*mU* mG (SEQ ID NO: 68), where m indicates a base with 2′O-Methyl modification, * indicates a phosphorothioate bond, and N's indicate the residues of the targeting domain, e.g., as described herein, (optionally with an inverted abasic residue at the 5′ and/or 3′ terminus); and

tracr:

[0449] mA*mA*mC*AGCAUAGCAAGUUAAAAUAAGGCUAGUCCGUUAUCAACUUGAA AAAGUGGCACCGAGUCGGUGCUUUU*mU*mU*mU (SEQ ID NO: 67), where m indicates a base with 2′O-Methyl modification, and * indicates a phosphorothioate bond (optionally with an inverted abasic residue at the 5′ and/or 3′ terminus).

[0450] In embodiments, the gRNA is a sgRNA and comprises or consists of:

[0451] mN*mN*mN*NNNNNNNNNNNNNNNNNGUUUUAGAGCUAGAAAUAGCAAGUUA AAAUAAGGCUAGUCCGUUAUCAACUUGAAAAAGUGGCACCGAGUCGGUGCU*mU*mU* mU (SEQ ID NO: 69), where in indicates a base with 2′O-Methyl modification, * indicates a phosphorothioate bond, and N's indicate the residues of the targeting domain, e.g., as described herein, (optionally with an inverted abasic residue at the 5′ and/or 3′ terminus).

[0452] In embodiments, the gRNA is a sgRNA and comprises or consists of:

[0453] mN*mN*mN*NNNNNNNNNNNNNNNNNGUUUUAGAGCUAGAAAUAGCAAGUUA AAAUAAGGCUAGUCCGUUAUCAACUUGAAAAAGUGGCACCGAGUCGGUGCmU*mU*m U*U (SEQ ID NO: 70, where m indicates a base with 2′O-Methyl modification, * indicates a phosphorothioate bond, and N's indicate the residues of the targeting domain, e.g., as described herein, (optionally with an inverted abasic residue at the 5′ and/or 3′ terminus).

### 6) First Tracr Extension

[0454] Where the gRNA comprises a first flagpole extension, the tracr may comprise a first tracr extension. The first tracr extension may comprise nucleotides that are complementary, e.g., 80%, 85%, 90%, 95% or 99%, e.g., fully complementary, to nucleotides of the first flagpole extension. In some aspects, the first tracr extension nucleotides that hybridize with complementary nucleotides of the first flagpole extension are contiguous. In some aspects, the first tracr extension nucleotides that hybridize with complementary nucleotides of the first flagpole extension are discontinuous, e.g., comprises two or more regions of hybridization separated by nucleotides that do not base pair with nucleotides of the first flagpole extension. In some aspects, the first tracr extension comprises at least 2, 3, 4, 5, 6, 7, 8, 9, 10, 11, 12, 13, 14, 15, 16, 17, 18, 19, 20 or more nucleotides. In some aspects, the first tracr extension comprises SEQ ID NO: 56. In some aspects the first tracr extension comprises nucleic acid that is at least 80%, 85%, 90%, 95% or 99% homology to SEQ ID NO: 56.

[0455] Some or all of the nucleotides of the first tracr extension can have a modification, e.g., modification found in Section XII herein.

[0456] In some embodiments, the sgRNA may comprise, from 5′ to 3′ and disposed 3′ to the targeting domain:

(SEQ ID NO: 71)
a) GUUUUAGAGCUAGAAAUAGCAAGUUAAAAUAAGGCUAGUCCGUUAUC
AACUUGAAAAAGUGGCACCGAGUCGGUGC;
(SEQ ID NO: 72)
b) GUUUUAAGAGCUAGAAAUAGCAAGUUUAAAUAAGGCUAGUCCGUUAU
CAACUUGAAAAAGUGGCACCGAGUCGGUGC;
(SEQ ID NO: 73)
c) GUUUUAGAGCUAUGCUGGAAACAGCAUAGCAAGUUAAAAUAAGGCUA
GUCCGUUAUCAACUUGAAAAAGUGGCACCGAGUCGGUGC;
(SEQ ID NO: 74)
d) GUUUAAGAGCUAUGCUGGAAACAGCAUAGCAAGUUUAAAUAAGGCUA
GUCCGUUAUCAACUUGAAAAAGUGGCACCGAGUCGGUGC;

[0457] e) any of a) to d), above, further comprising, at the 3′ end, at least 1, 2, 3, 4, 5, 6 or 7 uracil (U) nucleotides, e.g., 1, 2, 3, 4, 5, 6, or 7 uracil (U) nucleotides;
[0458] f) any of a) to d), above, further comprising, at the 3′ end, at least 1, 2, 3, 4, 5, 6 or 7 adenine (A) nucleotides, e.g., 1, 2, 3, 4, 5, 6, or 7 adenine (A) nucleotides; or
[0459] g) any of a) to f), above, further comprising, at the 5′ end (e.g., at the 5′ terminus, e.g., 5′ to the targeting domain), at least 1, 2, 3, 4, 5, 6 or 7 adenine (A) nucleotides, e.g., 1, 2, 3, 4, 5, 6, or 7 adenine (A) nucleotides.

[0460] In an embodiment, a sgRNA comprises or consists of from 5′ to 3′: [targeting domain]-GUUUUAGAGCUAGAAAUAGCAAGUUAAAAUAAGGCUAGUCCGUUAUCAACUUGAAAA AGUGGCACCGAGUCGGUGCUUUU (SEQ ID NO: 75).

[0461] In an embodiment, a sgRNA comprises or consists of from 5′ to 3′: [targeting domain]-GUUUAAGAGCUAUGCUGGAAACAGCAUAGCAAGUUUAAAUAAGGCUAGUCCGUUAUC AACUUGAAAAAGUGGCACCGAGUCGGUGCUUUU (SEQ ID NO: 76).

[0462] In embodiments, any of a) to g) above is disposed directly 3′ to the targeting domain.

[0463] In some embodiments, the dgRNA may comprise:

[0464] A crRNA comprising, from 5′ to 3′, preferably disposed directly 3′ to the targeting domain:

a) GUUUUAGAGCUA (SEQ ID NO: 50);
b) GUUUAAGAGUA (SEQ ID NO: 51);
c) GUUUUAGAGCUAUGCUG (SEQ ID NO: 77);
d) GUUUAAGAGCUAUGCUG (SEQ ID NO: 78);
e) GUUUUAGAGCUAUGCUGUUUU (SEQ ID NO: 79);
f) GUUUAAGAGCUAUGCUGUUUG (SEQ ID NO: 80);
or
g) GUUUUAGAGCUAUGCU (SEQ ID NO: 81):

[0465] and a tracr comprising, from 5′ to 3′:

(SEQ ID NO: 53)
a) UAGCAAGUUAAAAUAAGGCUAGUCCGUUAUCAACUUGAAAAAGUGGC
ACCGAGUCGGUGC;
(SEQ ID NO; 54)
b) UAGCAAGUUUAAAUAGGCUAGUCCGUUAUCAACUUGAAAAAGUGGCA
CCGAGUCGGUGC;
(SEQ ID NO; 82)
c) CAGCAUAGCAAGUUAAAAUAAGGCUAGUCCGUUAUCAACUUGAAAAA
GUGGCACCGAGUCGGUGC;
(SEQ ID NO: 83)
d) CAGCAUAGCAAGUUUAAAUAAGGCUAGUCCGUUAUCAACUUGAAAAA
GUGGCACCGAGUCGGUGC;
(SEQ ID NO: 65)
e) AACAGCAUAGCAAGUUAAAAUAAGGCUAGUCCGUUAUCAACUUGAAA
AAGUGGCACCGAGUCGGUGCUUUUUUU;
(SEQ ID NO: 84)
f) AACAGCAUAGCAAGUUUAAAUAAGGCUAGUCCGUUAUCAACUUGAAA
AAGUGGCACCGAGUCGGUGCUUUUUUU;
(SEQ ID NO: 76)
g) GUUUAAGAGCUAUGCUGGAAACAGCAUAGCAAGUUUAAAUAAGGCUA
GUCCGUUAUCAACUUGAAAAAGUGGCACCGAGUCGGUGCUUUU;
(SEQ ID NO: 85)
h) AGCAUAGCAAGUUAAAAUAAGGCUAGUCCGUUAUCAACUUGAAAAAG
UGGCACCGAGUCGGUGCUUU;
(SEQ ID NO: 86)
i) GUUGGAACCAUUCAAAACAGCAUAGCAAGUUAAAAUAAGGCUAGUCC
GUUAUCAACUUGAAAAAGUGGCACCGAGUCGGUGCUUU;
(SEQ ID NO: 87)
j) AACAGCAUAGCAAGUUAAAAUAAGGCUAGUCCGUUAUCAACUUGAAA
AAGUGGCACCGAGUCGGUGC;

[0466] k) any of a) to j), above, further comprising, at the 3′ end, at least 1, 2, 3, 4, 5, 6 or 7 uracil (U) nucleotides, e.g., 1, 2, 3, 4, 5, 6, or 7 uracil (U) nucleotides;
[0467] l) any of a) to j), above, further comprising, at the 3′ end, at least 1, 2, 3, 4, 5, 6 or 7 adenine (A) nucleotides, e.g., 1, 2, 3, 4, 5, 6, or 7 adenine (A) nucleotides; or
[0468] m) any of a) to l), above, further comprising, at the 5′ end (e.g., at the 5′ terminus), at least 1, 2, 3, 4, 5, 6 or 7 adenine (A) nucleotides, e.g., 1, 2, 3, 4, 5, 6, or 7 adenine (A) nucleotides.

[0469] In an embodiment, the sequence of k), above comprises the 3′ sequence UUUUUU, e.g., if a U6 promoter is used for transcription. In an embodiment, the sequence of k), above, comprises the 3′ sequence UUUU, e.g., if an HI promoter is used for transcription. In an embodiment, sequence of k), above, comprises variable numbers of 3′ U's depending, e.g., on the termination signal of the pol-III promoter used. In an embodiment, the sequence of k), above, comprises variable 3′ sequence derived from the DNA template if a T7 promoter is used. In an embodiment, the sequence of k), above, comprises variable 3′ sequence derived from the DNA template, e.g., if in vitro transcription is used to generate the RNA molecule. In an embodiment, the sequence of k), above, comprises variable 3′ sequence derived from the DNA template, e.g., if a pol-II promoter is used to drive transcription.

[0470] In an embodiment, the crRNA comprises SEQ ID NO: 79 and the tracr comprises, e.g., consists of AACAGCAUAGCAAGUUAAAAUAAGGCUAGUCCGUUAUCAACUUGAAAAAGU GGCACCGAGUCGGUGCUUUUUUU (SEQ ID NO: 65).

[0471] In an embodiment, the crRNA comprises SEQ ID NO: 80 and the tracr comprises or consists of AACAGCAUAGCAAGUUUAAAUAAGGCUAGUCCGUUAUCAACUUGAAAAAGU GGCACCGAGUCGGUGCUUUUUUU (SEQ ID NO: 84).

[0472] In an embodiment, the crRNA comprises or consists of a targeting domain and, disposed 3′ to the targeting domain (e.g., disposed directly 3′ to the targeting domain), a sequence comprising, e.g., consisting of, GUUUUAGAGCUAUGCU (SEQ ID NO: 81), and the tracr comprises or consists of GUUUAAGAGCUAUGCUGGAAACAGCAUAGCAAGUUUAAAUAAGGCUAGUCCGUU AUCAACUUGAAAAAGUGGCACCGAGUCGGUGCUUUU (SEQ ID NO: 76).

[0473] In an embodiment, the crRNA comprises or consists of a targeting domain and, disposed 3′ to the targeting domain (e.g., disposed directly 3′ to the targeting domain), a sequence comprising, e.g., consisting of, GUUUUAGAGCUAUGCU (SEQ ID NO: 81), and the tracr comprises or consists of AGCAUAGCAAGUUAAAAUAAGGCUAGUCCGUUAUCAACUUGAAAAAGUGGCACCG AGUCGGUGCUUU (SEQ ID NO: 85).

[0474] In an embodiment, the crRNA comprises or consists of a targeting domain and, disposed 3′ to the targeting domain (e.g., disposed directly 3′ to the targeting domain), a sequence comprising, e.g., consisting of, GUUUUAGAGCUAUGCUGUUUUG (SEQ ID NO: 79), and the tracr comprises or consists of GUUGGAACCAUUCAAAACAGCAUAGCAAGUUAAAAUAAGGCUAGUCCGU UAUCAACUUGAAAAAGUGGCACCGAGUCGGUGCUUU (SEQ ID NO: 86).

### Targeting Domains

[0475] Provided in the tables below are targeting domains for gRNA molecules for use in the CRISPR systems, cells, compositions and methods of the present disclosure, for example, in reducing or eliminating the expression and/or function of a molecule that regulates the expression of MHC II, a component of the T cell system, and optionally a molecule that regulates the expression of MHC I, and/or insertion of heterologous nucleic acid sequence (e.g., nucleic acid sequence encoding a CAR, e.g., as described herein) at or near a target sequence of a molecule that regulates the expression of MHC II, a component of the T cell system, and optionally a molecule that regulates the expression of MHC I.

TABLE 1a
gRNA targeting domains for RFX5, a molecule that regulates the expression of MHC II

| | | Genomic location | | SEQ |
|---|---|---|---|---|
| | | (hg38) of target | gRNA | ID |
| RFX5 ID | Strand | sequence | targeting domain sequence^{a} | NO: |
| 5993_11::chr1:151340619-151343198_2 | + | chr1:151340647-151340672 | AAAAUGUUUUAAUGUAUAUGUGUUA | 925 |
| 5993_11::chr1:151340619-151343198_4 | + | chr1:151340648-151340673 | AAAUGUUUUAAUGUAUAUGUGUUAU | 926 |
| 5993_11::chr1:151340619-151343198_6 | + | chr1:151340655-151340680 | UUAAUGUAUAUGUGUUAUGGGUCAU | 927 |
| 5993_11::chr1:151340619-151343198_20 | + | chr1:151340749-151340774 | UAUUAUAAUUUCUUAAAAUCUGCUG | 928 |
| 5993_11::chr1:151340619-151343198_23 | + | chr1:151340752-151340777 | UAUAAUUUCUUAAAAUCUGCUGUGG | 929 |
| 5993_11::chr1:151340619-151343198_35 | + | chr1:151340802-151340827 | UCCCUGAAAGAAAAUCAGUGUUUCU | 930 |
| 5993_11::chr1:151340619-151343198_36 | + | chr1:151340803-151340828 | CCCUGAAAGAAAAUCAGUGUUUCUU | 931 |
| 5993_11::chr1:151340619-151343198_45 | + | chr1:151340844-151340869 | CCCUGACAGAAGCUACCCUAUGUAG | 932 |
| 5993_11::chr1:151340619-151343198_47 | + | chr1:151340854-151340879 | AGCUACCCUAUGUAGAGGACAAAGU | 933 |
| 5993_11::chr1:151340619-151343198_48 | + | chr1:151340875-151340900 | AAGUAGGUCUUCAAUAAAUAUUAGU | 934 |
| 5993_11::chr1:151340619-151343198_51 | + | chr1:151340894-151340919 | AUUAGUUGGUUUACUGCUUUUCCCA | 935 |
| 5993_11::chr1:151340619-151343198_55 | + | chr1:151340904-151340929 | UUACUGCUUUUCCCAAGGAUACAUC | 936 |
| 5993_11::chr1:151340619-151343198_59 | + | chr1:151340907-151340932 | CUGCUUUUCCCAAGGAUACAUCUGG | 937 |
| 5993_11::chr1:151340619-151343198_61 | + | chr1:151340908-151340933 | UGCUUUUCCCAAGGAUACAUCUGGA | 938 |
| 5993_11::chr1:151340619-151343198_65 | + | chr1:151340929-151340954 | UGGAGGGUCUGCAUUCCUUUCUCAU | 939 |
| 5993_11::chr1:151340619-151343198_75 | + | chr1:151341024-151341049 | ACACGUAUGACAAGAUGCUGCCACC | 940 |
| 5993_11::chr1:151340619-151343198_77 | + | chr1:151341027-151341052 | CGUAUGACAAGAUGCUGCCACCUGG | 941 |
| 5993_11::chr1:151340619-151343198_81 | + | chr1:151341052-151341077 | UGGAUACAGAAUAGAUUUAAUGAAA | 942 |
| 5993_11::chr1:151340619-151343198_83 | + | chr1:151341057-151341082 | ACAGAAUAGAUUUAAUGAAAUGGCU | 943 |
| 5993_11::chr1:151340619-151343198_87 | + | chr1:151341077-151341102 | UGGCUAGGAAGUCUUUCACUCUAGU | 944 |
| 5993_11::chr1:151340619-151343198_89 | + | chr1:151341080-151341105 | CUAGGAAGUCUUUCACUCUAGUUCG | 945 |
| 5993_11::chr1:151340619-151343198_91 | + | chr1:151341086-151341111 | AGUCUUUCACUCUAGUUGGUGGAAC | 945 |
| 5993_11::chr1:151340619-151343198_93 | + | chr1:151341093-151341118 | CACUCUAGUUGGUGGAACUGGCAAU | 947 |
| 5993_11::chr1:151340519-151343198_95 | + | chr1:151341094-151341119 | ACUCUAGUUGGUGGAACUGGCAAUA | 948 |
| 5993_11::chr1:151340619-151343198_101 | + | chr1:151341101-151341126 | UUGGUGGAACUGGCAAUAGGGUGAG | 949 |
| 5993_11::chr1:151340619-151343198_103 | + | chr1:151341102-151341127 | UGGUGGAACUGGCAAUAGGGUGAGA | 950 |
| 5993_11::chr1:151340619-151343198_106 | + | chr1:151341109-151341134 | ACUGGCAAUAGGGUGAGAGGGAAGC | 951 |
| 5993_11::chr1:151340619-151343198_114 | + | chr1:151341137-151341162 | AAUGAGAAGACAAAAAUUAAGAAAC | 952 |
| 5993_11::chr1:151340619-151343198_116 | + | chr1:151341143-151341168 | AAGACAAAAAUUAAGAAACAGGAAA | 953 |
| 5993_11::chr1:151340619-151343198_119 | + | chr1:151341147-151341172 | CAAAAAUUAAGAAACAGGAAAAGGA | 954 |
| 5993_11::chr1:151340619-151343198_123 | + | chr1:151341166-151341191 | AAAGGAAGGAGCUCCAUCUCUAAUA | 955 |
| 5993_11::chr1:151340619-151343198_125 | + | chr1:151341169-151341194 | GGAAGGAGCUCCAUCUCUAAUAUGG | 956 |
| 5993_11::chr1:151340619-151343198_129 | + | chr1:151341181-151341206 | AUCUCUAAUAUGGAGGUAGAAAAAA | 957 |
| 5993_11::chr1:151340619-151343198_131 | + | chr1:151341182-151341207 | UCUCUAAUAUGGAGGUAGAAAAAAA | 958 |
| 5993_11::chr1:151340619-151343198_137 | + | chr1:151341218-151341243 | CUAAAUGAGACUGAAGAGUCCCUAG | 959 |
| 5993_11::chr1:151340619-151343198_141 | + | chr1:151341225-151341250 | AGACUGAAGAGUCCCUAGAGGAGAA | 960 |
| 5993_11::chrl:151340619-151343198_148 | + | chr1:151341260-151341285 | CUCCUUCCUUCUGAGACUAGAAACG | 961 |
| 5993_11::chr1:151340619-151343198_151 | + | chr1:151341267-151341292 | CUUCUGAGACUAGAAACGAGGAAAG | 962 |
| 5993_11::chr1:151340619-151343198_157 | + | chr1:151341285-151341310 | AGGAAAGAGGCUACAGCUUGUAUUG | 963 |
| 5993_11::chr1:151340619-151343198_159 | + | chr1:151341286-151341311 | GGAAAGAGGCUACAGCUUGUAUUGA | 964 |
| 5993_11::chr1:151340619-151343198_162 | + | chr1:151341302-151341327 | UUGUAUUGAGGGAAAUGCAAGACUG | 965 |
| 5993_11::chr1:151340619-151343198_170 | + | chr1:151341317-151341342 | UGCAAGACUGAGGAGAAAAGAAAGC | 966 |
| 5993_11::chr1:151340619-151343198_172 | + | chr1:151341361-151341386 | UUAGCAAGCUAAAAUAAGAGUAGCC | 967 |
| 5993_11::chr1:151340619-151343198_174 | + | chr1:151341370-151341395 | UAAAAUAAGAGUAGCCUGGUGUUAG | 968 |
| 5993_11::chr1:151340619-151343198_178 | + | chr1:151341407-151341432 | CAACUCCCUGCUCCUAGUUUCCACU | 969 |
| 5993_11::chr1:151340619-151343198_180 | + | chr1:151341408-151341433 | AACUCCCUGCUCCUAGUUUCCACUU | 970 |
| 5993_11::chr1:151340619-151343198_182 | + | chr1:151341409-151341434 | ACUCCCUGCUCCUAGUUUCCACUUG | 971 |
| 5993_11::chr1:151340619-151343198_184 | + | chr1:151341426-151341451 | UCCACUUGGGGAAUCCAUGUGAUUU | 972 |
| 5993_11::chr1:151340619-151343198_188 | + | chr1:151341427-151341452 | CCACUUGGGGAAUCCAUGUGAUUUU | 973 |
| 5993_11::chr1:151340619-151343198_191 | + | chr1:151341428-151341453 | CACUUGGGGAAUCCAUGUGAUUUUG | 974 |
| 5993_11::chr1:151340619-151343198_192 | + | chr1:151341431-151341456 | UUGGGGAAUCCAUGUGAUUUUGGGG | 975 |
| 5993_11::chr1:151340619-151343198_197 | + | chr1:151341457-151341482 | GGCUGACCCCCACCCUUUUCCCCAA | 976 |
| 5993_11::chr1:151340619-151343198_204 | + | chr1:151341506-151341531 | AGCAAAUUAGCAUGUAUCAUCCUCC | 977 |
| 5993_11::chr1:151340619-151343198_206 | + | chr1:151341519-151341544 | GUAUCAUCCUCCUGGCCACAGUGAU | 978 |
| 5993_11::chr1:151340619-151343198_208 | + | chr1:151341524-151341549 | AUCCUCCUGGCCACAGUGAUUGGUC | 979 |
| 5993_11::chr1:151340619-151343198_209 | + | chr1:151341525-151341550 | UCCUCCUGGCCACAGUGAUUGGUCA | 980 |
| 5993_11::chr1:151340619-151343198_211 | + | chr1:151341528-151341553 | UCCUGGCCACAGUGAUUGGUCAGGG | 981 |
| 5993_11::chr1:151340619-151343198_212 | + | chr1:151341542-151341567 | AUUGGUCAGGGUGGACAUGUGACCC | 982 |
| 5993_11::chr1:151340619-151343198_216 | + | chr1:151341564-151341589 | CCCAGGCCUAAUCAGUGUGAAUAUU | 983 |
| 5993_11::chr1:151340619-151343198_217 | + | chr1:151341565-151341590 | CCAGGCCUAAUCAGUGUGAAUAUUA | 984 |
| 5993_11::chr1:151340619-151343198_219 | + | chr1:151341584-151341609 | AUAUUAGGGCUUUUGCUGAGAUUUC | 985 |
| 5993_11::chr1:151340619-151343198_227 | + | chr1:151341612-151341637 | UACAAAGAUGCCUUCUUUUUCUGAU | 986 |
| 5993_11::chr1:151340619-151343198_229 | + | chr1:151341622-151341647 | CCUUCUUUUUCUGAUUGGACAUAAA | 987 |
| 5993_11::chr1:151340619-151343198_232 | + | chr1:151341623-151341648 | CUUCUUUUUCUGAUUGGACAUAAAU | 988 |
| 5993_11::chr1:151340619-151343198_233 | + | chr1:151341624-151341649 | UUCUUUUUCUGAUUGGACAUAAAUG | 989 |
| 5993_11::chr1:151340619-151343198_243 | + | chr1:151341641-151341666 | CAUAAAUGGGGAAAAGUGUAAUCUU | 990 |
| 5993_11::chr1:151340619-151343198_244 | + | chr1:151341649-151341674 | GGGAAAAGUGUAAUCUUAGGAAUGC | 991 |
| 5993_11::chr1:151340619-151343198_245 | + | chr1:151341663-151341688 | CUUAGGAAUGCUGGCAGCCAUUAAG | 992 |
| 5993_11::chr1:151340619-151343198_247 | + | chr1:151341678-151341703 | AGCCAUUAAGUGGCCCAGACUUAAA | 993 |
| 5993_11::chr1:151340619-151343198_254 | + | chr1:151341718-151341743 | UGCAACAGUGAGAAAAAAGUCAGUC | 994 |
| 5993_11::chr1:151340619-151343198_258 | + | chr1:151341744-151341769 | GGUAUUUAGAGACAUACUGAACUAC | 995 |
| 5993_11::chr1:151340619-151343198_259 | + | chr1:151341745-151341770 | GUAUUUAGAGACAUACUGAACUACU | 996 |
| 5993_11::chr1:151340619-151343198_264 | + | chr1:151341761-151341786 | UGAACUACUGGGUCAAGUCUUCACC | 997 |
| 5993_11::chr1:151340619-151343198_266 | + | chr1:151341779-151341804 | CUUCACCUGGAGCCAGCACUACCUA | 998 |
| 5993_11::chr1:151340619-151343198_273 | + | chr1:151341836-151341861 | UUUUUAUUUUAAGCCAGUUUGAAUU | 999 |
| 5993_11::chr1:151340619-151343198_291 | + | chr1:151341912-151341937 | ACUUAGCCCAUUCCUACCUUCCCAC | 1000 |
| 5993_11::chr1:151340619-151343198_295 | + | chr1:151341922-151341947 | UUCCUACCUUCCCACAGGAUAGCAC | 1001 |
| 5993_11::chr1:151340619-151343198_296 | + | chr1:151341923-151341948 | UCCUACCUUCCCACAGGAUAGCACA | 1002 |
| 5993_11::chr1:151340619-151343198_299 | + | chr1:151341931-151341956 | UCCCACAGGAUAGCACAGGGAAUAC | 1003 |
| 5993_11::chr1:151340619-151343198_301 | + | chr1:151341936-151341961 | CAGGAUAGCACAGGGAAUACAGGUA | 1004 |
| 5993_11::chr1:151340619-151343198_302 | + | chr1:151341954-151341979 | ACAGGUAAGGUCACUACAGAUUUAU | 1005 |
| 5993_11::chr1:151340619-151343198_304 | + | chr1:151341971-151341996 | AGAUUUAUUGGUUACACUAAAGCCC | 1006 |
| 5993_11::chr1:151340619-151343198_305 | + | chr1:151341972-151341997 | GAUUUAUUGGUUACACUAAAGCCCA | 1007 |
| 5993_11::chr1:151340619-151343198_311 | + | chr1:151341988-151342013 | UAAAGCCCAGGGUAUCAAGCUGAAA | 1008 |
| 5993_11::chr1:151340619-151343198_313 | + | chr1:151341995-151342020 | CAGGGUAUCAAGCUGAAAAGGUCAG | 1009 |
| 5993_11::chr1:151340619-151343198_314 | + | chr1:151342006-151342031 | GCUGAAAAGGUCAGAGGCAGCAACC | 1010 |
| 5993_11::chr1:151340619-151343198_316 | + | chr1:151342021-151342046 | GGCAGCAACCAGGUACUAAGUAGAC | 1011 |
| 5993_11::chr1:151340619-151343198_317 | + | chr1:151342022-151342047 | GCAGCAACCAGGUACUAAGUAGACU | 1012 |
| 5993_11::chr1:151340619-151343198_320 | + | chr1:151342045-151342070 | CUGGGUGACUCAGCUGUCUGUACAG | 1013 |
| 5993_11::chr1:151340619-151343198_325 | + | chr1:151342052-151342077 | ACUCAGCUGUCUGUACAGAGGAGAA | 1014 |
| 5993_11::chr1:151340619-151343198_327 | + | chr1:151342063-151342088 | UGUACAGAGGAGAAUGGACUUCCUU | 1015 |
| 5993_11::chr1:151340619-151343198_337 | + | chr1:151342100-151342125 | GCCAAAUGAGAAGCAAGUGCAAAGA | 1016 |
| 5993_11::chr1:151340619-151343198_338 | + | chr1:151342101-151342126 | CCAAAUGAGAAGCAAGUGCAAAGAA | 1017 |
| 5993_11::chr1:151340619-151343198_339 | + | chr1:151342112-151342137 | GCAAGUGCAAAGAAGGGCCUCUACU | 1018 |
| 5993_11::chr1:151340619-151343198_342 | + | chr1:151342127-151342152 | GGCCUCUACUAGGCAAAGUUAACGU | 1019 |
| 5993_11::chr1:151340619-151343198_343 | + | chr1:151342128-151342153 | GCCUCUACUAGGCAAAGUUAACGUA | 1020 |
| 5993_11::chr1:151340619-151343198_346 | + | chr1:151342163-151342188 | CACUCUUCCCCACAGACCUGUAUCA | 1021 |
| 5993_11::chr1:151340619-151343198_348 | + | chr1:151342164-151342189 | ACUCUUCCCCACAGACCUGUAUCAU | 1022 |
| 5993_11::chr1:151340619-151343198_350 | + | chr1:151342165-151342190 | CUCUUCCCCACAGACCUGUAUCAUG | 1023 |
| 5993_11::chr1:151340619-151343198_351 | + | chr1:151342166-151342191 | UCUUCCCCACAGACCUGUAUCAUGG | 1024 |
| 5993_11::chr1:151340619-151343198_354 | + | chr1:151342178-151342203 | ACCUGUAUCAUGGGGGUGUUGCUUU | 1025 |
| 5993_11::chr1:151340619-151343198_355 | + | chr1:151342179-151342204 | CCUGUAUCAUGGGGGUGUUGCUUUU | 1026 |
| 5993_11::chr1:151340619-151343198_358 | + | chr1:151342194-151342219 | UGUUGCUUUUGGGUCUUUAUGCUCC | 1027 |
| 5993_11::chr1:151340619-151343198_359 | + | chr1:151342195-151342220 | GUUGCUUUUGGGUCUUUAUGCUCCU | 1028 |
| 5993_11::chr1:151340619-151343198_362 | + | chr1:151342201-151342226 | UUUGGGUCUUUAUGCUCCUGGGAUA | 1029 |
| 5993_11::chr1:151340619-151343198_372 | + | chr1:151342244-151342269 | GCUCCUUUAAGUCUUUAUUACCCUG | 1030 |
| 5993_11::chr1:151340619-151343198_380 | + | chr1:151342274-151342299 | CAGUGUCUACCUCUCCCUUUGCCAA | 1031 |
| 5993_11::chr1:151340619-151343198_381 | + | chr1:151342290-151342315 | CUUUGCCAAAGGAAAAGCCUCCUUU | 1032 |
| 5993_11::chr1:151340619-151343198_390 | + | chr1:151342324-151342349 | CUGCCCUUGAUGACACUCACUUUUG | 1033 |
| 5993_11::chr1:151340619-151343198_392 | + | chr1:151342325-151342350 | UGCCCUUGAUGACACUCACUUUUGA | 1034 |
| 5993_11::chr1:151340619-151343198_394 | + | chr1:151342326-151342351 | GCCCUUGAUGACACUCACUUUUGAG | 1035 |
| 5993_11::chr1:151340619-151343198_396 | + | chr1:151342333-151342358 | AUGACACUCACUUUUGAGGGGACCA | 1036 |
| 5993_11::chr1:151340619-151343198_399 | + | chr1:151342334-151342359 | UGACACUCACUUUUGAGGGGACCAA | 1037 |
| 5993_11::chr1:151340619-151343198_404 | + | chr1:151342357-151342382 | AAGUGAAUUUUAUCUUCUGCUUCUU | 1038 |
| 5993_11::chr1:151340619-151343198_406 | + | chr1:151342365-151342390 | UUUAUCUUCUGCUUCUUUGGUAUGC | 1039 |
| 5993_11::chr1:151340619-151343198_409 | + | chr1:151342366-151342391 | UUAUCUUCUGCUUCUUUGGUAUGCU | 1040 |
| 5993_11::chr1:151340619-151343198_414 | + | chr1:151342372-151342397 | UCUGCUUCUUUGGUAUGCUGGGAAC | 1041 |
| 5993_11::chr1:151340619-151343198_416 | + | chr1:151342373-151342398 | CUGCUUCUUUGGUAUGCUGGGAACC | 1042 |
| 5993_11::chr1:151340619-151343198_417 | + | chr1:151342374-151342399 | UGCUUCUUUGGUAUGCUGGGAACCG | 1043 |
| 5993_11::chr1:151340619-151343198_424 | + | chr1:151342390-151342415 | UGGGAACCGGGGCCCCUUCCUCCUU | 1044 |
| 5993_11::chr1:151340619-151343198_428 | + | chr1:151342416-151342441 | GGAAACAGUNCCAUCUCCCUGACCC | 1045 |
| 5993_11::chr1:151340619-151343198_429 | + | chr1:151342417-151342442 | GAAACAGUACCAUCUCCCUGACCCU | 1046 |
| 5993_11::chr1:151340619-151343198_431 | + | chr1:151342451-151342476 | CUGCCCCCUUUUCAGCCUCUCCCAU | 1047 |
| 5993_11::chr1:151340619-151343198_432 | + | chr1:151342457-151342482 | CCUUUUCAGCCUCUCCCAUUGGCCC | 1048 |
| 5993_11::chr1:151340619-151343198_440 | + | chr1:151342514-151342539 | CCCCUCCUGAGCCCCAUGUCUCCCA | 1049 |
| 5993_11::chr1:151340619-151343198_444 | + | chr1:151342525-151342550 | CCCCAUGUCUCCCAUGGUAACCUUG | 1050 |
| 5993_11::chr1:151340619-151343198_446 | + | chr1:151342530-151342555 | UGUCUCCCAUGGUAACCUUGAGGAC | 1051 |
| 5993_11::chr1:151340619-151343198_447 | + | chr1:151342531-151342556 | GUCUCCCAUGGUAACCUUGAGGACU | 1052 |
| 5993_11::chr1:151340619-151343198_448 | + | chr1:151342543-151342568 | AACCUUGAGGACUGGGCAGAUUCCA | 1053 |
| 5993_11::chr1:151340619-151343198_454 | + | chr1:151342562-151342587 | AUUCCAUGGCAGCUGCUGACUUGAG | 1054 |
| 5993_11::chr1:151340619-151343198_455 | + | chr1:151342563-151342588 | UUCCAUGGCAGCUGCUGACUUGAGA | 1055 |
| 5993_11::chr1:151340619-151343198_456 | + | chr1:151342564-151342589 | UCCAUGGCAGCUGCUGACUUGAGAG | 1056 |
| 5993_11::chr1:151340619-151343198_464 | + | chr1:151342604-151342629 | CCCCACUUCCACCUGACUUUUUUCG | 1057 |
| 5993_11::chr1:151340619-151343198_466 | + | chr1:151342605-151342630 | CCCACUUCCACCUGACUUUUUUCGA | 1058 |
| 5993_11::chr1:151340619-151343198_470 | + | chr1:151342624-151342649 | UUUCGAGGGCGCCCCCGUUUCCUUU | 1059 |
| 5993_11::chr1:151340619-151343198_481 | + | chr1:151342670-151342695 | CUAUAUCCUGCUUUGCUGCUUUAGC | 1060 |
| 5993_11::chr1:151340619-151343198_483 | + | chr1:151342673-151342698 | UAUCCUGCUUUGCUGCUUUAGCUGG | 1061 |
| 5993 11::chr1:151340619-151343198_487 | + | chr1:151342687-151342712 | GCUUUAGCUGGUGGAGCCUGCCCAC | 1062 |
| 5993_11::chr1:151340619-151343198_490 | + | chr1:151342700-151342725 | GAGCCUGCCCACUGGCCUCACUCAC | 1063 |
| 5993_11::chr1:151340619-151343198_492 | + | chr1:151342736-151342761 | CUGUCCUCUUGACACCCUUGUCAUG | 1064 |
| 5993_11::chr1:151340619-151343198_493 | + | chr1:151342743-151342768 | CUUGACACCCUUGUCAUGUGGUCCU | 1065 |
| 5993_11::chr1:151340619-151343198_499 | + | chr1:151342782-151342807 | GCCUACCUCUCUGUUCUCUGUGCCC | 1066 |
| 5993_11::chr1:151340619-151343198_500 | + | chr1:151342783-151342808 | CCUACCUCUCUGUUCUCUGUGCCCC | 1067 |
| 5993_11::chr1:151340619-151343198_501 | + | chr1:151342784-151342809 | CUACCUCUCUGUUCUCUGUGCCCCG | 1068 |
| 5993_11::chr1:151340619-151343198_505 | + | chr1:151342802-151342827 | UGCCCCGGGGCUGAGUGAGUCCCCC | 1069 |
| 5993_11::chr1:151340619-151343198_507 | + | chr1:151342805-151342830 | CCCGGGGCUGAGUGAGUCCCCCAGG | 1070 |
| 5993_11::chr1:151340619-151343198_509 | + | chr1:151342817-151342842 | UGAGUCCCCCAGGUGGAGCUCGCCC | 1071 |
| 5993_11::chr1:151340619-151343198_510 | + | chr1:151342823-151342848 | CCCCAGGUGGAGCUCGCCCAGGCCC | 1072 |
| 5993_11::chr1:151340619-151343198_511 | + | chr1:151342829-151342854 | GUGGAGCUCGCCCAGGCCCAGGUCC | 1073 |
| 5993_11::chr1:151340619-151343198_512 | + | chr1:151342835-151342860 | CUCGCCCAGGCCCAGGUCCAGGUCC | 1074 |
| 5993_11::chr1:151340619-151343198_514 | + | chr1:151342844-151342869 | GCCCAGGUCCAGGUCCAGGCAAAGC | 1075 |
| 5993_11::chr1:151340619-151343198_516 | + | chr1:151342853-151342878 | CAGGUCCAGGCAAAGCAGGAACAGU | 1076 |
| 5993_11::chr1:151340619-151343198_518 | + | chr1:151342873-151342898 | ACAGUUGGUAAGAUCAUGUUAAUGA | 1077 |
| 5993_11::chr1:151340619-151343198_519 | + | chr1:151342874-151342899 | CAGUUGGUAAGAUCAUGUUAAUGAU | 1078 |
| 5993_11::chr1:151340619-151343198_523 | + | chr1:151342886-151342911 | UCAUGUUAAUGAUGGGCACAGCUGC | 1079 |
| 5993 11::chr1:151340619-151343198_525 | + | chr1:151342887-151342912 | CAUGUUNAUGAUGGGCACAGCUGCU | 1080 |
| 5993_11::chr1:151340619-151343198_526 | + | chr1:151342888-151342913 | AUGUUAAUGAUGGGCACAGCUGCUG | 1081 |
| 5993_11::chr1:151340619-151343198_527 | + | chr1:151342889-151342914 | UGUUAAUGAUGGGCACAGCUGCUGG | 1082 |
| 5993 11::chr1:151340619-151343198_529 | + | chr1:151342897-151342922 | AUGGGCACAGCUGCUGGGGGUGCCC | 1083 |
| 5993_11::chr1:151340619-151343198_531 | + | chr1:151342913-151342938 | GGGGUGCCCCGGCCCUACUAGACAG | 1084 |
| 5993_11::chr1:151340619-151343198_533 | + | chr1:151342932-151342957 | AGACAGAGGCAGUGUAGCCACUUUC | 1085 |
| 5993_11::chr1:151340619-151343198_534 | + | chr1:151342933-151342958 | GACAGAGGCAGUGUAGCCACUUUCA | 1086 |
| 5993_11::chr1:151340619-151343198_540 | + | chr1:151342951-151342976 | ACUUUCAGGGCACCUGAAGAAAGCC | 1087 |
| 5993_11::chr1:151340619-151343198_542 | + | chr1:151342952-151342977 | CUUUCAGGGCACCUGAAGAAAGCCU | 1088 |
| 5993_11::chr1:151340619-151343198_543 | + | chr1:151342953-151342978 | UUUCAGGGCACCUGAAGAAAGCCUG | 1089 |
| 5993_11::chr1:151340619-151343198_544 | + | chr1:151342954-151342979 | UUCAGGGCACCUGAAGAAAGCCUGG | 1090 |
| 5993_11::chr1:151340619-151343198_549 | + | chr1:151342964-151342989 | CUGAAGAAAGCCUGGGGGCCAGAAU | 1091 |
| 5993_11::chr1:151340619-151343198_551 | + | chr1:151342967-151342992 | AAGAAAGCCUGGGGGCCAGAAUAGG | 1092 |
| 5993_11::chr1:151340619-151343198_555 | + | chr1:151342976-151343001 | UGGGGGCCAGAAUAGGUGGAGAGAC | 1093 |
| 5993_11::chr1:151340619-151343198_557 | + | chr1:151342977-151343002 | GGGGGCCAGAAUAGGUGGAGAGACU | 1094 |
| 5993_11::chr1:151340619-151343198_558 | + | chr1:151342982-151343007 | CCAGAAUAGGUGGAGAGACUGGGAU | 1095 |
| 5993_11::chr1:151340619-151343198_561 | + | chr1:151342985-151343010 | GAAUAGGUGGAGAGACUGGGAUUGG | 1096 |
| 5993_11::chr1:151340619-151343198_566 | + | chr1:151343000-151343025 | CUGGGAUUGGCGGAAUUAGUGAGCG | 1097 |
| 5993_11::chr1:151340619-151343198_567 | + | chr1:151343001-151343026 | UGGGAUUGGCGGAAUUAGUGAGCGA | 1098 |
| 5993_11::chr1:151340619-151343198_568 | + | chr1:151343002-151343027 | GGGAUUGGCGGAAUUAGUGAGCGAG | 1099 |
| 5993_11::chr1:151340619-151343198_570 | + | chr1:151343007-151343032 | UGGCGGAAUUAGUGAGCGAGGGGCC | 1100 |
| 5993_11::chr1:151340619-151343198_572 | + | chr1:151343008-151343033 | GGCGGAAUUAGUGAGCGAGGGGCCC | 1101 |
| 5993_11::chr1:151340619-151343198_575 | + | chr1:151343009-151343034 | GCGGAAUUAGUGAGCGAGGGGCCCG | 1102 |
| 5993_11::chr1:151340619-151343198_578 | + | chr1:151343013-151343038 | AAUUAGUGAGCGAGGGGCCCGGGGA | 1103 |
| 5993_11::chr1:151340619-151343198_582 | + | chr1:151343021-151343046 | AGCGAGGGGCCCGGGGAAGGAGCAG | 1104 |
| 5993_11::chr1:151340619-151343198_585 | + | chr1:151343037-151343062 | AAGGAGCAGAGGCAGCCGAGCCACU | 1105 |
| 5993_11::chr1:151340619-151343198_586 | + | chr1:151343038-151343063 | AGGAGCAGAGGCAGCCGAGCCACUA | 1106 |
| 5993_11::chr1:151340619-151343198_587 | + | chr1:151343052-151343077 | CCGAGCCACUAGGGCAUUAACCUGC | 1107 |
| 5993_11::chr1:151340619-151343198_588 | + | chr1:151343059-151343084 | ACUAGGGCAUUAACCUGCAGGUUAU | 1108 |
| 5993_11::chr1:151340619-151343198_591 | + | chr1:151343066-151343091 | CAUUAACCUGCAGGUUAUUGGCUCC | 1109 |
| 5993_11::chr1:151340619-151343198_592 | + | chr1:151343067-151343092 | AUUAACCUGCAGGUUAUUGGCUCCU | 1110 |
| 5993_11::chr1:151340619-151343198_593 | + | chr1:151343068-151343093 | UUAACCUGCAGGUUAUUGGCUCCUG | 1111 |
| 5993_11::chr1:151340619-151343198_601 | + | chr1:151343114-151343139 | UCUUCUUCCGCUCUCCACGUGCGAG | 1112 |
| 5993_11::clr1:151340619-151343198_603 | + | chr1:151343119-151343144 | UUCCGCUCUCCACGUGCGAGAGGAC | 1113 |
| 5993_11::chr1:151340619-151343198_606 | + | chr1:151343130-151343155 | ACGUGCGAGAGGACCGGCCCCAGUU | 1114 |
| 5993_11::chr1:151340619-151343198_607 | + | chr1:151343131-151343156 | CGUGCGAGAGGACCGGCCCCAGUUC | 1115 |
| 5993_11::chr1:151340619-151343198_609 | + | chr1:151343147-151343172 | CCCCAGUUCGGGCUUCCAGAUCCUU | 1116 |
| 5993_11::chr1:151340619-151343198_611 | + | chr1:151343150-151343175 | CAGUUCGGGCUUCCAGAUCCUUAGG | 1117 |
| 5993_11::chr1:151340619-151343198_617 | + | chr1:151343168-151343193 | CCUUAGGAGGCUAAAAAGUAAAGAG | 1118 |
| 5993_11::chr1:151340619-151343198_647 | − | chr1:151340806-151340831 | CCCAAGAAACACUGAUUUUCUUUCA | 1119 |
| 5993_11::chr1:151340619-151343198_649 | − | chr1:151340807-151340832 | UCCCAAGAAACACUGAUUUUCUUUC | 1120 |
| 5993_11::chr1:151340619-151343198_657 | − | chr1:151340839-151340864 | UAGGGUAGCUUCUGUCAGGGAAUCU | 1121 |
| 5993_11::chr1:151340619-151343198_658 | − | chr1:151340847-151340872 | CCUCUACAUAGGGUAGCUUCUGUCA | 1122 |
| 5993_11::chr1:151340619-151343198_661 | − | chr1:151340848-151340873 | UCCUCUACAUAGGGUAGCUUCUGUC | 1123 |
| 5993_11::chr1:151340619-151343198_665 | − | chr1:151340862-151340887 | GAAGACCUACUUUGUCCUCUACAUA | 1124 |
| 5993_11::chr1:151340519-151343198_667 | − | chr1:151340863-151340888 | UGAAGACCUACUUUGUCCUCUACAU | 1125 |
| 5993_11::chr1:151340619-151343198_673 | − | chr1:151340918-151340943 | AUGCAGACCCUCCAGAUGUAUCCUU | 1126 |
| 5993_11::chr1:151340619-151343198_675 | − | chr1:151340919-151340944 | AAUGCAGACCCUCCAGAUGUAUCCU | 1127 |
| 5993_11::chr1:151340619-151343198_678 | − | chr1:151340947-151340972 | UGUGGUCAGGCGGCACCAAUGAGAA | 1128 |
| 5993_11::chr1:151340619-151343198_684 | − | chr1:151340962-151340987 | GGAAAAAGCUAGUUCUGUGGUCAGG | 1129 |
| 5993_11::chr1:151340619-151343198_685 | − | chr1:151340965-151340990 | CACGGAAAAAGCUAGUUCUGUGGUC | 1130 |
| 5993_11::chr1:151340619-151343198_686 | − | chr1:151340970-151340995 | GAUGUCACGGAAAAAGCUAGUUCUG | 1131 |
| 5993_11::ctr1:151340619-151343198_690 | − | chr1:151340988-151341013 | ACUGCGGGGUUUAGGUUAGAUGUCA | 1132 |
| 5993_11::chr1:151340619-151343198_694 | − | chr1:151341001-151341026 | GUCAGGACUUAGGACUGCGGGGUUU | 1133 |
| 5993_11::chr1:151340619-151343198_695 | − | chr1:151341007-151341032 | AUACGUGUCAGGACUUAGGACUGCG | 1134 |
| 5993_11::chr1:151340619-151343198_696 | − | chr1:151341008-151341033 | CAUACGUGUCAGGACUUAGGACUGC | 1135 |
| 5993_11::chr1:151340619-151343198_697 | − | chr1:151341009-151341034 | UCAUACGUGUCAGGACUUAGGACUG | 1136 |
| 5993_11::chr1:151340619-151343198_701 | − | chr1:151341016-151341041 | CAUCUUGUCAUACGUGUCAGGACUU | 1137 |
| 5993_11::chr1:151340519-151343198_703 | − | chr1:151341023-151341048 | GUGGCAGCAUCUUGUCAUACGUGUC | 1138 |
| 5993_11::chr1:151340619-151343198_707 | − | chr1:151341047-151341072 | UUAAAUCUAUUCUGUAUCCACCAGG | 1139 |
| 5993_11::chr1:151340619-151343198_709 | − | chr1:151341050-151341075 | UCAUUAAAUCUAUUCUGUAUCCACC | 1140 |
| 5993_11::chr1:151340619-151343198_737 | − | chr1:151341182-151341207 | UUUUUUUCUACCUCCAUAUUAGAGA | 1141 |
| 5993_11::chr1:151340619-151343198_745 | − | chr1:151341240-151341265 | AGGAGAGGGAAGCCAUUCUCCUCUA | 1142 |
| 5993_11::chr1:151340619-151343198_746 | − | chr1:151341241-151341266 | AAGGAGAGGGAAGCCAUUCUCCUCU | 1143 |
| 5993_11::chr1:151340619-151343198_752 | − | chr1:151341259-151341284 | GUUUCUAGUCUCAGAAGGAAGGAGA | 1144 |
| 5993_11::chr1:151340619-151343198_753 | − | chr1:151341260-151341285 | CGUUUCUAGUCUCAGAAGGAAGGAG | 1145 |
| 5993_11::chr1:151340619-151343198_759 | − | chr1:151341265-151341290 | UUCCUCGUUUCUAGUCUCAGAAGGA | 1146 |
| 5993_11::chr1:151340619-151343198_763 | − | chr1:151341269-151341294 | CUCUUUCCUCGUUUCUAGUCUCAGA | 1147 |
| 5993_11::chr1:151340619-151343198_784 | − | chr1:151341387-151341412 | AGUUGCUUGGGUGGCCGCUAACACC | 1148 |
| 5993_11::chr1:151340619-151343198_785 | − | chr1:151341401-151341426 | AACUAGGAGCAGGGAGUUGCUUGGG | 1149 |
| 5993_11::chr1:151340619-151343198_786 | − | chr1:151341404-151341429 | GGAAACUAGGAGCAGGGAGUUGCUU | 1150 |
| 5993_11::chr1:151340619-151343198_787 | − | chr1:151341405-151341430 | UGGAAACUAGGAGCAGGGAGUUGCU | 1151 |
| 5993_11::chr1:151340619-151343198_790 | − | chr1:151341415-151341440 | UAACCCCAAGUGGAAACUAGGAGCA | 1152 |
| 5993_11::chr1:151340619-151343198_793 | − | chr1:151341416-151341441 | CUAACCCCAAGUGGAAACUAGGAGC | 1153 |
| 5993_11::chr1:151340619-151343198_796 | − | chr1:151341422-151341447 | GUGUACCUAACCCCAAGUGGAAACU | 1154 |
| 5993_11::chr1:151340619-151343198_798 | − | chr1:151341430-151341455 | GGGUUUUAGUGUACCUAACCCCAAG | 1155 |
| 5993 11::chr1:151340619-151343198_801 | − | chr1:151341443-151341468 | CCCCCAGUCGGAGGGGUUUUAGUGU | 1156 |
| 5993_11::chr1:151340619-151343198_805 | − | chr1:151341466-151341491 | UGUUGUGGAAACCCCUUUUCCCACC | 1157 |
| 5993_11::chr1:151340619-151343198_806 | − | chr1:151341467-151341492 | CUGUUGUGGAAACCCCUUUUCCCAC | 1158 |
| 5993 11::chr1:151340619-151343198_807 | − | chr1:151341468-151341493 | CCUGUUGUGGAAACCCCUUUUCCCA | 1159 |
| 5993_11::chr1:151340619-151343198_809 | − | chr1:151341469-151341494 | ACCUGUUGUGGAAACCCCUUUUCCC | 1160 |
| 5993_11::chr1:151340619-151343198_812 | − | chr1:151341472-151341497 | AGUACCUGUUGUGGAAACCCCUUUU | 1161 |
| 5993_11::chr1:151340619-151343198_813 | − | chr1:151341473-151341498 | UAGUACCUGUUGUGGAAACCCCUUU | 1162 |
| 5993_11::chr1:151340619-151343198_817 | − | chr1:151341479-151341504 | AAGAUAUAGUACCUGUUGUGGAAAC | 1163 |
| 5993_11::chr1:151340619-151343198_819 | − | chr1:151341480-151341505 | UAAGAUAUAGUACCUGUUGUGGAAA | 1164 |
| 5993_11::chr1:151340619-151343198_822 | − | chr1:151341481-151341506 | AUAAGAUAUAGUACCUGUUGUGGAA | 1165 |
| 5993_11::chr1:151340619-151343198_826 | − | chr1:151341494-151341519 | UACGAUUAAACGAAUAAGAUAUAGU | 1166 |
| 5993_11::chr1:151340619-151343198_828 | − | chr1:151341529-151341554 | UGGGACUGGUUAGUGACACCGGUCC | 1167 |
| 5993_11::chr1:151340619-151343198_831 | − | chr1:151341532-151341557 | AGGUGGGACUGGUUAGUGACACCGG | 1168 |
| 5993_11::chr1:151340619-151343198_833 | − | chr1:151341537-151341562 | UGUACAGGUGGGACUGGUUAGUGAC | 1169 |
| 5993_11::chr1:151340619-151343198_836 | − | chr1:151341567-151341592 | GGAUUAUAAGUGUGACUAAUCCGGA | 1170 |
| 5993_11::chr1:151340619-151343198_837 | − | chr1:151341568-151341593 | GGGAUUAUAAGUGUGACUAAUCCGG | 1171 |
| 5993_11::chr1:151340619-151343198_839 | − | chr1:151341573-151341598 | UUUUCGGGAUUAUAAGUGUGACUAA | 1172 |
| 5993_11::chr1:151340619-151343198_845 | − | chr1:151341625-151341650 | GGUAAAUACAGGUUAGUCUUUUUCU | 1173 |
| 5993_11::chr1:151340619-151343198_857 | − | chr1:151341683-151341708 | CUGGUAAAUUCAGACCCGGUGAAUU | 1174 |
| 5993_11::chr1:151340619-151343198_859 | − | chr1:151341694-151341719 | UAGAAGACAUCCUGGUAAAUUCAGA | 1175 |
| 5993_11::chr1:151340619-151343198_860 | − | chr1:151341695-151341720 | GUAGAAGACAUCCUGGUAAAUUCAG | 1176 |
| 5993_11::chr1:151340619-151343198_867 | − | chr1:151341710-151341735 | AAAAAGAGUGACAACGUAGAAGACA | 1177 |
| 5993_11::chr1:151340619-151343198_871 | − | chr1:151341745-151341770 | UCAUCAAGUCAUACAGAGAUUUNUG | 1178 |
| 5993_11::chr1:151340619-151343198_875 | − | chr1:151341787-151341812 | UUUCAGGUAUCCAUCACGACCGAGG | 1179 |
| 5993_11::chr1:151340619-151343198_876 | − | chr1:151341794-151341819 | AUUGAUCUUUCAGGUAUCCAUCACG | 1180 |
| 5993_11::chr1:151340619-151343198_878 | − | chr1:151341803-151341828 | ACCAAGUACAUUGAUCUUUCAGGUA | 1181 |
| 5993_11::chr1:151340619-151343198_884 | − | chr1:151341828-151341853 | GACCGAAUUUUAUUUUUCCUAAAUA | 1182 |
| 5993_11::chr1:151340619-151343198_886 | − | chr1:151341837-151341862 | AUUAAGUUUGACCGAAUUUUAUUUU | 1183 |
| 5993_11::chr1:151340619-151343198_888 | − | chr1:151341852-151341877 | UUUAGUGUCUUUUGGAUUAAGUUUG | 1184 |
| 5993_11::chr1:151340619-151343198_897 | − | chr1:151341884-151341909 | AUGAAAUAUAUCCAAUCCCUAGAAA | 1185 |
| 5993_11::chr1:151340619-151343198_898 | − | chr1:151341893-151341918 | CUAAGUAUGAUGAAAUAUAUCCAAU | 1186 |
| 5993_11::chr1:151340619-151343198_899 | − | chr1:151341894-151341919 | GCUAAGUAUGAUGAAAUAUAUCCAA | 1187 |
| 5993_11::chr1:151340619-151343198_902 | − | chr1:151341899-151341924 | AAUGGGCUAAGUAUGAUGAAAUAUA | 1188 |
| 5993_11::chr1:151340619-151343198_904 | − | chr1:151341921-151341946 | UGCUAUCCUGUGGGAAGGUAGGAAU | 1189 |
| 5993_11::chr1:151340619-151343198_905 | − | chr1:151341922-151341947 | GUGCUAUCCUGUGGGAAGGUAGGAA | 1190 |
| 5993_11::chr1:151340619-151343198_907 | − | chr1:151341927-151341952 | UCCCUGUGCUAUCCUGUGGGAAGGU | 1191 |
| 5993_11::chr1:151340619-151343198_911 | − | chr1:151341931-151341956 | GUAUUCCCUGUGCUAUCCUGUGGGA | 1192 |
| 5993_11::chr1:151340619-151343198_912 | − | chr1:151341935-151341960 | ACCUGUAUUCCCUGUGCUAUCCUGU | 1193 |
| 5993_11::chr1:151340619-151343198_914 | − | chr1:151341936-151341961 | UACCUGUAUUCCCUGUGCUAUCCUG | 1194 |
| 5993_11::chr1:151340619-151343198_924 | − | chr1:151341996-151342021 | UCUGACCUUUUCAGCUUGAUACCCU | 1195 |
| 5993_11::chr1:151340619-151343198_925 | − | chr1:151341997-151342022 | CUCUGACCUUUUCAGCUUGAUACCC | 1196 |
| 5993_11::chr1:151340619-151343198_929 | − | chr1:151342032-151342057 | UGAGUCACCCAGUCUACUUAGUACC | 1197 |
| 5993_11::chr1:151340619-151343198_939 | − | chr1:151342087-151342112 | UUCUCAUUUGGCUAUUCUUUUCCUA | 1198 |
| 5993_11::chr1:151340619-151343198_946 | − | chr1:151342104-151342129 | CCCUUCUUUGCACUUGCUUCUCAUU | 1199 |
| 5993_11::chr1:151340619-151343198_950 | − | chr1:151342132-151342157 | UCCCUACGUUAACUUUGCCUAGUAG | 1200 |
| 5993_11::chr1:151340619-151343198_956 | − | chr1:151342173-151342198 | AACACCCCCAUGAUACAGGUCUGUG | 1201 |
| 5993_11::chr1:151340619-151343198_957 | − | chr1:151342174-151342199 | CAACACCCCCAUGAUACAGGUCUGU | 1202 |
| 5993_11::chr1:151340619-151343198_959 | − | chr1:151342175-151342200 | GCAACACCCCCAUGAUACAGGUCUG | 1203 |
| 5993_11::chr1:151340619-151343198_962 | − | chr1:151342182-151342207 | CCCAAAAGCAACACCCCCAUGAUAC | 1204 |
| 5993_11::chr1:151340619-151343198_967 | − | chr1:151342220-151342245 | CAUGUGCUUCAAAGUUCCUUAUCCC | 1205 |
| 5993_11::chr1:151340619-151343198_970 | − | chr1:151342250-151342275 | GCACCACAGGGUAAUAAAGACUUAA | 1206 |
| 5993_11::chr1:151340619-151343198_973 | − | chr1:151342267-151342292 | AGGGAGAGGUAGACACUGCACCACA | 1207 |
| 5993_11::chr1:151340619-151343198_974 | − | chr1:151342268-151342293 | AAGGGAGAGGUAGACACUGCACCAC | 1208 |
| 5993_11::chr1:151340619-151343198_981 | − | chr1:151342286-151342311 | GAGGCUUUUCCUUUGGCAAAGGGAG | 1209 |
| 5993_11::chr1:151340619-151343198_984 | − | chr1:151342291-151342316 | AAAAGGAGGCUUUUCCUUUGGCAAA | 1210 |
| 5993_11::chr1:151340619-151343198_985 | − | chr1:151342292-151342317 | CAAAAGGAGGCUUUUCCUUUGGCAA | 1211 |
| 5993_11::chr1:151340619-151343198_988 | − | chr1:151342298-151342323 | AGAAGCCAAAAGGAGGCUUUUCCUU | 1212 |
| 5993_11::chr1:151340619-151343198_989 | − | chit 151342310-151342335 | AUCAAGGGCAGCAGAAGCCAAAAGG | 1213 |
| 5993_11::chr1:151340619-151343198_990 | − | chr1:151342313-151342338 | GUCAUCAAGGGCAGCAGAAGCCAAA | 1214 |
| 5993_11::chr1:151340619-151343198_995 | − | chr1:151342330-151342355 | UCCCCUCAAAAGUGAGUGUCAUCAA | 1215 |
| 5993_11::chr1:151340619-151343198_996 | − | chr1:151342331-151342356 | GUCCCCUCAAAAGUGAGUGUCAUCA | 1216 |
| 5993_11::chr1:151340619-151343198_1001 | − | chr1:151342358-151342383 | AAAGAAGCAGAAGAUAAAAUUCCCU | 1217 |
| 5993_11::chr1:151340619-151343198_1009 | − | chr1:151342399-151342424 | CUGUUUCCAAAGGAGGAAGGGGCCC | 1218 |
| 5993_11::chr1:151340619-151343198_1010 | − | chr1:151342405-151342430 | AUGGUACUGUUUCCAAAGGAGGAAG | 1219 |
| 5993_11::chr1:151340619-151343198_1011 | − | chr1:151342406-151342431 | GAUGGUACUGUUUCCAAAGGAGGAA | 1220 |
| 5993_11::chr1:151340619-151343198_1012 | − | chr1:151342407-151342432 | AGAUGGUACUGUUUCCAAAGGAGGA | 1221 |
| 5993_11::chr1:151340619-151343198_1015 | − | chr1:151342411-151342436 | AGGGAGAUGGUACUGUUUCCAAAGG | 1222 |
| 5993_11::chr1:151340619-151343198_1018 | − | chr1:151342414-151342439 | GUCAGGGAGAUGGUACUGUUUCCAA | 1223 |
| 5993_11::chr1:151340619-151343198_1022 | − | chr1:151342429-151342454 | CAGUACUUGCCCAGGGUCAGGGAGA | 1224 |
| 5993_11::chr1:151340619-151343198_1024 | − | chr1:151342435-151342460 | AGGGGGCAGUACUUGCCCACGGUCA | 1225 |
| 5993_11::chr1:151340619-151343198_1025 | − | chr1:151342436-151342461 | AAGGGGGCAGUACUUGCCCAGGGUC | 1226 |
| 5993_11::chr1:151340619-151343198_1028 | − | chr1:151342441-151342466 | CUGAAAAGGGGGCAGUACUUGCCCA | 1227 |
| 5993_11::chr1:151340619-151343198_1029 | − | chr1:151342442-151342467 | GCUGAAAAGGGGGCAGUACUUGCCC | 1228 |
| 5993_11::chr1:151340619-151343198_1031 | − | chr1:151342457-151342482 | GGGCCAAUGGGAGAGGCUGAAAAGG | 1229 |
| 5993_11::chr1:151340619-151343198_1032 | − | chr1:151342458-151342483 | AGGGCCAAUGCGGGAGGCUGAAAAG | 1230 |
| 5993_11::chr1:151340619-151343198_1034 | − | chr1:151342459-151342484 | CAGGGCCAAUGGGAGAGGCUGAAAA | 1231 |
| 5993_11::chr1:151340619-151343198_1036 | − | chr1:151342460-151342485 | CCAGGGCCAAUGGGAGAGGCUGAAA | 1232 |
| 5993_11::chr1:151340619-151343198_1039 | − | chr1:151342469-151342494 | GCAGAGAGGCCAGGGCCAAUGGGAG | 1233 |
| 5993_11::chr1:151340619-151343198_1042 | − | chr1:151342474-151342499 | GAGGGGCAGAGAGGCCAGGGCCAAU | 1234 |
| 5993_11::chr1:151340619-151343198_1043 | − | chr1:151342475-151342500 | GGAGGGGCAGAGAGGCCAGGGCCAA | 1235 |
| 5993_11::chr1:151340619-151343198_1046 | − | chr1:151342482-151342507 | CUCAGCUGGAGGGGCAGAGAGGCCA | 1236 |
| 5993_11::chr1:151340619-151343198_1047 | − | chr1:151342483-151342508 | ACUCAGCUGGAGGGGCAGAGAGGCC | 1237 |
| 5993_11::chr1:151340619-151343198_1049 | − | chr1:151342488-151342513 | AGGCAACUCAGCUGGAGGGGCAGAG | 1238 |
| 5993_11::chr1:151340619-151343198_1052 | − | chr1:151342496-151342521 | GGAGGGGAAGGCAACUCAGCUGGAG | 1239 |
| 5993_11::chr1:151340619-151343198_1053 | − | chr1:151342497-151342522 | AGGAGGGGAAGGCAACUCAGCUGGA | 1240 |
| 5993_11::chr1:151340619-151343198_1054 | − | chr1:151342498-151342523 | CAGGAGGGGNAGGCAACUCAGCUGG | 1241 |
| 5993_11::chr1:151340619-151343198_1058 | − | chr1:151342501-151342526 | GCUCAGGAGGGGAAGGCAACUCAGC | 1242 |
| 5993_11::chr1:151340619-151343198_1060 | − | chr1:151342513-151342538 | GGGAGACAUGGGGCUCAGGAGGGGA | 1243 |
| 5993_11::chr1:151340619-151343198_1061 | − | chr1:151342517-151342542 | CCAUGGGAGACAUGGGGCUCAGGAG | 1244 |
| 5993_11::chr1:151340619-151343198_1064 | − | chr1:151342518-151342543 | ACCAUGGGAGACAUGGGGCUCAGGA | 1245 |
| 5993_11::chr1:151340619-151343198_1066 | − | chr1:151342519-151342544 | UACCAUGGGAGACAUGGGGCUCAGG | 1246 |
| 5993_11::chr1:151340619-151343198_1069 | − | chr1:151342522-151342547 | GGUUACCAUGGGAUACAUGUGGCUC | 1247 |
| 5993_11::chr1:151340619-151343198_1072 | − | chr1:151342528-151342553 | CCUCAAGGUUACCAUGGGAGACAUG | 1248 |
| 5993_11::chr1:151340619-151343198_1073 | − | chr1:151342529-151342554 | UCCUCAAGGUUACCAUGGGAGACAU | 1249 |
| 5993_11::chr1:151340619-151343198_1074 | − | chr1:151342530-151342555 | GUCCUCAAGGUUACCAUGGGAGACA | 1250 |
| 5993_11::chr1:151340619-151343198_1078 | − | chr1:151342538-151342563 | UCUGCCCAGUCCUCAAGGUUACCAU | 1251 |
| 5993_11::chr1:151340619-151343198_1079 | − | chr1:151342539-151342564 | AUCUGCCCAGUCCUCAAGGUUACCA | 1252 |
| 5993_11::chr1:151340619-151343198_1082 | − | chr1:151342548-151342573 | UGCCAUGGAAUCUGCCCAGUCCUCA | 1253 |
| 5993_11::chr1:151340619-151343198_1084 | − | chr1:151342568-151342593 | ACCCCUCUCAAGUCAGCAGCUGCCA | 1254 |
| 5993_11::chr1:151340619-151343198_1087 | − | chr1:151342602-151342627 | AAAAAAGUCAGGUGGAAGUGGGGAA | 1255 |
| 5993_11::chr1:151340619-151343198_1091 | − | chr1:151342607-151342632 | CCUCGAAAAAAGUCAGGUGGAAGUG | 1256 |
| 5993_11::chr1:151340619-151343198_1092 | − | chr1:151342608-151342633 | CCCUCGAAAAAAGUCAGGUGGAAGU | 1257 |
| 5993_11::chr1:151340619-151343198_1095 | − | chr1:151342609-151342634 | GCCCUCGAAAAAAGUCAGGUGGAAG | 1258 |
| 5993_11::chr1:151340619-151343198_1097 | − | chr1:151342615-151342640 | GGGGGCGCCCUCGAAAAAAGUCAGG | 1259 |
| 5993_11::chr1:151340619-151343198_1100 | − | chr1:151342618-151342643 | AACGGGGGCGCCCUCGAAAAAAGUC | 1260 |
| 5993_11::chr1:151340619-151343198_1102 | − | chr1:151342638-151342663 | AGCAAGUGAUGCCAAAAGGAAACGG | 1261 |
| 5993_11::chr1:151340619-151343198_1103 | − | chr1:151342639-151342664 | CAGCAAGUGAUGCCAAAAGGAAACG | 1262 |
| 5993_11::chr1:151340619-151343198_1104 | − | chr1:151342640-151342665 | ACAGCAAGUGAUGCCAAAAGGAAAC | 1263 |
| 5993_11::chr1:151340619-151343198_1107 | − | chr1:151342641-151342666 | UACAGCAAGUGAUGCCAAAAGGAAA | 1264 |
| 5993_11::chr1:151340619-151343198_1110 | − | chr1:151342647-151342672 | AGAGGAUACAGCAAGUGAUGCCAAA | 1265 |
| 5993_11::chr1:151340619-151343198_1112 | − | chr1:151342670-151342695 | GCUAAAGCAGCAAAGCAUGAUAUAG | 1266 |
| 5993_11::chr1:151340619-151343198_1115 | − | chr1:151342679-151342704 | GCUCCACCAGCUAAAGCAGCAAAGC | 1267 |
| 5993_11::chr1:151340619-151343198_1117 | − | chr1:151342706-151342731 | GUACCUGUGAGUGAGGCCAGUGGGC | 1268 |
| 5993_11::chr1:151340619-151343198_1118 | − | chr1:151342710-151342735 | UGAAGUACCUGUGAGUGAGGCCAGU | 1269 |
| 5993_11::chr1:151340619-151343198_1119 | − | chr1:151342711-151342736 | CUGAAGUACCUGUGAGUGAGGCCAG | 1270 |
| 5993_11::cha1:151340619-151343198_1121 | − | chr1:151342718-151342743 | AGGACAGCUGAAGUACCUGUGAGUG | 1271 |
| 5993_11::chr1:151340619-151343198_1125 | − | chr1:151342743-151342768 | AGGACCACAUGACAAGGGUGUCAAG | 1272 |
| 5993_11::chr1:151340619-151343198_1128 | − | chr1:151342753-151342778 | GUGGUGACCAAGGACCACAUGACAA | 1273 |
| 5993_11::chr1:151340619-151343198_1129 | − | chr1:151342754-151342779 | GGUGGUGACCAAGGACCACAUGACA | 1274 |
| 5993_11::chr1:151340619-151343198_1131 | − | chr1:151342768-151342793 | GAGAGGUAGGCAUAGGUGGUGACCA | 1275 |
| 5993_11::chr1:151340619-151343198_1133 | − | chr1:151342777-151342802 | CAGAGAACAGAGAGGUAGGCAUAGG | 1276 |
| 5993_11::chr1:151340619-151343198_1134 | − | chr1:151342780-151342805 | GCACAGAGAACAGAGAGGUAGGCAU | 1277 |
| 5993_11::chr1:151340619-151343198_1135 | − | chr1:151342786-151342811 | CCCGGGGCACAGAGAACAGAGAGGU | 1278 |
| 5993_11::chr1:151340619-151343198_1136 | − | chr1:151342790-151342815 | CAGCCCCGGGGCACAGAGAACAGAG | 1279 |
| 5993_11::chr1:151340619-151343198_1142 | − | chr1:151342807-151342832 | CACCUGGGGGACUCACUCAGCCCCG | 1280 |
| 5993_11::chr1:151340619-151343198_1143 | − | chr1:151342808-151342833 | CCACCUGGGGGACUCACUCAGCCCC | 1281 |
| 5993_11::chr1:151340619-151343198_1145 | − | chr1:151342809-151342834 | UCCACCUGGGGGACUCACUCAGCCC | 1282 |
| 5993_11::chr1:151340619-151343198_1147 | − | chr1:151342825-151342850 | CUGGGCCUGGGCGAGCUCCACCUGG | 1283 |
| 5993_11::chr1:151340619-151343198_1148 | − | chr1:151342826-151342851 | CCUGGGCCUGGGCGAGCUCCACCUG | 1284 |
| 5993_11::chr1:151340619-151343198_1151 | − | chr1:151342827-151342852 | ACCUGGGCCUGGGCGAGCUCCACCU | 1285 |
| 5993_11::chr1:151340619-151343198_1153 | − | chr1:151342828-151342853 | GACCUGGGCCUGGGCGAGCUCCACC | 1286 |
| 5993_11::chr1:151340619-151343198_1158 | − | chr1:151342842-151342867 | UUUGCCUGGACCUGGACCUGGGCCU | 1287 |
| 5993_11::chr1:151340619-151343198_1159 | − | chr1:151342843-151342868 | CUUUGCCUGGACCUGGACCUGGGCC | 1288 |
| 5993_11::chr1:151340619-151343198_1161 | − | chr1:151342848-151342873 | UCCUGCUUUGCCUGGACCUGGACCU | 1289 |
| 5993_11::chr1:151340619-151343198_1163 | − | chr1:151342849-151342874 | UUCCUGCUUUGCCUGGACCUGGACC | 1290 |
| 5993_11::chr1:151340619-151343198_1165 | − | chr1:151342855-151342880 | CAACUGUUCCUGCUUUGCCUGGACC | 1291 |
| 5993_11::chr1:151340619-151343198_1168 | − | chr1:151342861-151342886 | UCUUACCAACUGUUCCUGCUUUGCC | 1292 |
| 5993_11::chr1:151340619-151343198_1171 | − | chr1:151342922-151342947 | ACACUGCCUCUGUCUAGUAGGGCCG | 1293 |
| 5993_11::chr1:151340619-151343198_1172 | − | chr1:151342923-151342948 | UACACUGCCUCUGUCUAGUAGGGCC | 1294 |
| 5993_11::chr1:151340619-151343198_1174 | − | chr1:151342924-151342949 | CUACACUGCCUCUGUCUAGUAGGGC | 1295 |
| 5993_11::chr1:151340619-151343198_1176 | − | chr1:151342928-151342953 | GUGGCUACACUGCCUCUGUCUAGUA | 1296 |
| 5993_11::chr1:151340619-151343198_1177 | − | chr1:151342929-151342954 | AGUGGCUACACUGCCUCUGUCUAGU | 1297 |
| 5993_11::chr1:151340619-151343198_1182 | − | chr1:151342952-151342977 | AGGCUUUCUUCAGGUGCCCUGAAAG | 1298 |
| 5993_11::chr1:151340619-151343198_1185 | − | chr1:151342966-151342991 | CUAUUCUGGCCCCCAGGCUUUCUUC | 1299 |
| 5993_11::chr1:151340619-151343198_1186 | − | chr1:151342977-151343002 | AGUCUCUCCACCUAUUCUGGCCCCC | 1300 |
| 5993_11::chr1:151340619-151343198_1187 | − | chr1:151342985-151343010 | CCAAUCCCAGUCUCUCCACCUAUUC | 1301 |
| 5993_11::chr1:151340619-151343198_1190 | − | chr1:151343033-151343058 | GCUCGGCUGCCUCUGCUCCUUCCCC | 1302 |
| 5993_11::chr1:151340619-151343198_1191 | − | chr1:151343034-151343059 | GGCUCGGCUGCCUCUGCUCCUUCCC | 1303 |
| 5993_11::chr1:151340619-151343198_1194 | − | chfl:151343055-151343080 | CCUGCAGGUUAAUGCCCUAGUGGCU | 1304 |
| 5993_11::chr1:151340619-151343198_1195 | − | chr1:151343060-151343085 | AAUAACCUGCAGGUUAAUGCCCUAG | 1305 |
| 5993_11::chr1:151340619-151343198_1196 | − | chr1:151343075-151343100 | UCGGCCCCAGGAGCCAAUAACCUGC | 1306 |
| 5993_11::chr1:151340619-151343198_1198 | − | chr1:151343092-151343117 | AGAGUGUAGUUGAGAGCUCGGCCCC | 1307 |
| 5993_11::chr1:151340619-151343198_1201 | − | chr1:151343099-151343124 | CGGAAGAAGAGUGUAGUUGAGAGCU | 1308 |
| 5993_11::chr1:151340619-151343198_1208 | − | chr1:151343124-151343149 | GGCCGGUCCUCUCGCACGUGGAGAG | 1309 |
| 5993_11::chr1:151340619-151343198_1212 | − | chr1:151343131-151343156 | GAACUGGGGCCGGUCCUCUCGCACG | 1310 |
| 5993_11::chr1:151340619-151343198_1214 | − | chr1:151343146-151343171 | AGGAUCUGGNAGCCCGAACUGGGGC | 1311 |
| 5993_11::chr1:151340619-151343198_1215 | − | chr1:151343150-151343175 | CCUAAGGAUCUGGAAGCCCGAACUG | 1312 |
| 5993_11:.chr1:151340619-151343198_1216 | − | chr1:151343151-151343176 | UCCUAAGGAUCUGGAAGCCCGAACU | 1313 |
| 5993_11::chr1:151340619-151343198_1218 | − | chr1:151343152-151343177 | CUCCUAAGGAUCUGGAAGCCCGAAC | 1314 |
| 5993_11::chr1:151340619-151343198_1228 | − | chr1:151343165-151343190 | UUUACUUUUUAGCCUCCUAAGGAUC | 1315 |
| 5993_11::chr1:151340619-151343198_1230 | − | chr1:151343171-151343196 | CCUCUCUUUACUUUUUAGCCUCCUA | 1316 |
| 5993_10::chr1:151343321-151343462_1 | + | chr1:151343331-151343356 | ACUUCCUUACCUGGGCCAGUCUCUC | 1317 |
| 5993_10::chr1:151343321-151343462_5 | + | chr1:151343341-151343366 | CUGGGCCAGUCUCUCUGGCUUCUUG | 1318 |
| 5993_10::chr1:151343321-151343462_6 | + | chr1:151343342-151343367 | UGGGCCAGUCUCUCUGGCUUCUUGU | 1319 |
| 5993_10::chr1:151343321-151343462_8 | + | chr1:151343355-151343380 | CUGGCUUCUUGUGGGCUCCACCCUC | 1320 |
| 5993_10::chr1:151343321-151343462_9 | + | chr1:151343356-151343381 | UGGCUUCUUGUGGGCUCCACCCUCU | 1321 |
| 5993_10::chr1:151343321-151343462_12 | + | chr1:151343376-151343401 | CCUCUGGGUUCUCUAAACCAUUCUU | 1322 |
| 5993_10:.chr1:151343321-151343462_15 | + | chr1:151343397-151343422 | UCUUUGGUUUAGAUGACCGUUCCCG | 1323 |
| 5993_10::chrl:151343321-151343462_23 | + | chr1:151343423-151343448 | GGUGCAUGUUCGUCCUCUUCUGCAG | 1324 |
| 5993_10::chr1:151343321-151343462_24 | + | chr1:151343434-151343459 | GUCCUCUUCUGCAGAGGUACCAAAA | 1325 |
| 5993_10:.chr1:151343321-151343462_26 | − | chr1:151343328-151343353 | AGACUGGCCCAGGUAAGGAAGUCAG | 1326 |
| 5993_10::chr1:151343321-151343462_27 | − | chr1:151343338-151343363 | GAAGCCAGAGAGACUGGCCCAGGUA | 1327 |
| 5993_10::chr1:151343321-151343462_30 | − | chr1:151343343-151343368 | CACAAGAAGCCAGAGAGACUGGCCC | 1328 |
| 5993_10::chr1:151343321-151343462_31 | − | chr1:151343349-151343374 | GGAGCCCACAAGAAGCCAGAGAGAC | 1329 |
| 5993.10::chr1:151343321-151343462_39 | − | chr1:151343375-151343400 | AGAAUGGUUUAGAGAACCCAGAGGG | 1330 |
| 5993_10::chr1:151343321-151343462_41 | − | chr1:151343378-151343403 | CAAAGAAUGGUUUAGAGAACCCAGA | 1331 |
| 5993_10::chr1:151343321-151343462_42 | − | chr1:151343379-151343404 | CCAAAGAAUGGUUUAGAGAACCCAG | 1332 |
| 5993_10::chr1:151343321-151343462_48 | − | chr1:151343396-151343421 | GGGAACGGUCAUCUAAACCAAAGAA | 1333 |
| 5993_10::chr1:151343321-151343462_50 | − | chr1:151343416-151343441 | AGAGGACGAACAUGCACCUCGGGAA | 1334 |
| 5993_10::chr1:151343321-151343462_51 | − | chr1:151343421-151343446 | GCAGAAGAGGACGAACAUGCACCUC | 1335 |
| 5993_10::chr1:151343321-151343462_53 | − | chr1:151343422-151343447 | UGCAGAAGAGGACGAACAUGCACCU | 1336 |
| 5993_9::chr1:151343660-151343902_1 | + | chr1:151343667-151343692 | AGGGUCAACACACCAGCGAGCCCCA | 1337 |
| 5993_9::chr1:151343060-151343902_3 | + | chr1:151343681-151343706 | AGCGAGCCCCAUGGCCUUAAGCACA | 1338 |
| 5993_9::chr1:151343660-151343902_4 | + | chr1:151343682-151343707 | GCGAGCCCCAUGGCCUUAAGCACAU | 1339 |
| 5993_9::chr1:151343660-151343902_6 | + | chr1:151343696-151343721 | CUUAAGCACAUGGGCAUGUGCAGAU | 1340 |
| 5993_9::chr1:151343660-151343902_7 | + | chr1:151343697-151343722 | UUAAGCACAUGGGCAUGUGCAGAUC | 1341 |
| 5993_9::chr1:151343660-151343902_13 | + | chr1:151343723-151343748 | GGCAGAGAUGAGAUGCUGCUGUAGC | 1342 |
| 5993_9::chr1:151343660-151343902_15 | + | chr1:151343729-151343754 | GAUGAGAUGCUGCUGUAGCAGGAAG | 1343 |
| 5993_9::chr1:151343660-151343902_16 | + | chr1:151343730-151343755 | AUGAGAUGCUGCUGUAGCAGGAAGC | 1344 |
| 5993_9::chr1:151343660-151343902_19 | + | chr1:151343745-151343770 | AGCAGGAAGCGGGCGACCUCAACGA | 1345 |
| 5993_9::chr1:151343660-151343902_22 | + | chr1:151343754-151343779 | CGGGCGACCUCAACGAUGGAACUGA | 1346 |
| 5993_9::chr1:151343660-151343902_24 | + | chr1:151343765-151343790 | AACGAUGGAACUGAAGGACCGUUUC | 1347 |
| 5993_9::chr1:151343060-151343902_25 | + | chr1:151343787-151343812 | UUCAGGAUCCGCUCUGCCCAGUCAC | 1348 |
| 5993_9::chr1:151343660-151343902_29 | + | chr1:151343792-151343817 | GAUCCGCUCUGCCCAGUCACAGGUC | 1349 |
| 5993_9::chr1:151343660-151343902_30 | + | chr1:151343793-151343818 | AUCCGCUCUGCCCAGUCACAGGUCA | 1350 |
| 5993_9::chr1:151343660-151343902_32 | + | chr1:151343824-151343849 | ACGCUGCCUCCACCAGUUCAUCUCG | 1351 |
| 5993_9::chr1:151343660-151343902_35 | + | chr1:151343830-151343855 | CCUCCACCAGUUCAUCUCGAGGUGC | 1352 |
| 5993_9::chr1:151343660-151343902_36 | + | chr1:151343831-151343856 | CUCCACCAGUUCAULUCGAGGUGCU | 1353 |
| 5993_9::chr1:151343660-151343902_37 | + | chr1:151343832-151343857 | UCCACCAGUUCAUCUCGAGGUGCUG | 1354 |
| 5993_9::chr1:151343660-151343902_39 | + | chr1:151343842-151343867 | CAUCUCGAGGUGCUGGGGUUACUUC | 1355 |
| 5993_9::chr1:151343660-151343902_40 | + | chr1:151343843-151343868 | AUCUCGAGGUGCUGGGGUUACUUCU | 1356 |
| 5993_9::chr1:151343660-151343902_42 | + | chr1:151343854-151343879 | CUGGGGUUACUUCUGGGCCCAUUUC | 1357 |
| 5993_9::chr1:151343660-151343902_46 | + | chr1:151343863-151343888 | CUUCUGGGCCCAUUUCUGGCUGAAG | 1358 |
| 5993_9::chr1:151343660-151343902_49 | + | chr1:151343864-151343889 | UUCUGGGCCCAUUUCUGGCUGAAGU | 1359 |
| 5993_9::chr1:151343660-151343902_51 | + | chr1:151343865-151343890 | UCUGGGCCCAUUUCUGGCUGAAGUG | 1360 |
| 5993_9::chr1:151343660-151343902_54 | + | chr1:151343869-151343894 | GGCCCAUUUCUGGCUGAAGUGGGGA | 1361 |
| 5993_9::chr1:151343660-151343902_58 | − | chr1:151343682-151343707 | AUGUGCUUAAGGCCAUGGGGCUCGC | 1362 |
| 5993_9::chr1:151343660-151343902_59 | − | chr1:151343690-151343715 | ACAUGCCCAUGUGCUUAAGGCCAUG | 1363 |
| 5993_9::chr1:151343660-151343902_60 | − | chr1:151343691-151343716 | CACAUGCCCAUGUGCUUAAGGCCAU | 1364 |
| 5993_9::chr1:151343660-151343902_61 | − | chr1:151343692-151343717 | GCACAUGCCCAUGUGCUUAAGGCCA | 1365 |
| 5993_9::chr1:151343660-151343902_64 | − | chr1:151343698-151343723 | CGAUCUGCACAUGCCCAUGUGCUUA | 1366 |
| 5993_9::chr1:151343660-151343902_69 | − | chr1:151343764-151343789 | AAACGGUCCUUCAGUUCCAUCGUUG | 1367 |
| 5993_9::chr1:151343660-151343902_71 | − | chr1:151343786-151343811 | UGACUGGGCAGAGCGGAUCCUGAAA | 1368 |
| 5993_9::chr1:151343660-151343902_73 | − | chr1:151343798-151343823 | UGCCCUGACCUGUGACUGGGCAGAG | 1369 |
| 5993_9::chr1:151343660-151343902_76 | − | chr1:151343806-151343831 | GCAGCGUGUGCCCUGACCUGUGACU | 1370 |
| 5993_9::chr1:151343660-151343902_77 | − | chr1:151343807-151343832 | GGCAGCGUGUGCCCUGACCUGUGAC | 1371 |
| 5993_9::chr1:151343660-151343902_79 | − | chr1:151343833-151343858 | CCAGCACCUCGAGAUGAACUGGUGG | 1372 |
| 5993_9::chr1:151343660-151343902_81 | − | chr1:151343836-151343861 | ACCCCAGCACCUCGAGAUGAACUGG | 1373 |
| 5993_9::chr1:151343660-151343902_83 | − | chr1:151343839-151343864 | GUAACCCCAGCACCUCGAGAUGAAC | 1374 |
| 5993_9::chr1:151343660-151343902_90 | − | chr1:151343874-151343899 | GUCCYUCCCCACUUCAGCCAGAAAU | 1375 |
| 5993_9::chr1:151343660-151343902_91 | − | chr1:151343875-151343900 | UGUCCUUCCCCACUUCAGCCAGAAA | 1376 |
| 5993_8::chr1:151344176-151344298_3 | + | chr1:151344187-151344212 | GGUACUUACACUCUCAGAACCCUUU | 1377 |
| 5993_8::ciul:151344176-151344298_6 | + | chr1:151344198-151344223 | UCUCAGAACCCUUUAGGUCAAGUCC | 1378 |
| 5993_8::chr1:151344176-151344298_8 | + | chr1:151344202-151344227 | AGAACCCUUUAGGUCAAGUCCAGGC | 1379 |
| 5993_8::chr1:151344176-151344298_10 | + | chr1:151344203-151344228 | GAACCCUUUAGGUCAAGUCCAGGCA | 1380 |
| 5993_8::ciul:151344176-151344298_11 | + | chr1:151344204-151344229 | AACCCUUUAGGUCAAGUCCAGGCAG | 1381 |
| 5993_8::chr1:151344176-151344298_12 | + | chr1:151344207-151344232 | CCUUUAGGUCAAGUCCAGGCAGGGG | 1382 |
| 5993_8::chr1:151344176-151344298_15 | + | chr1:151344221-151344246 | CCAGGCAGGGGUGGCAUAGACACCA | 1383 |
| 5993_8::chr1:151344176-151344298_23 | − | chr1:151344209-151344234 | CACCCCUGCCUGGACUUGACCUAAA | 1384 |
| 5993_8::chr1:151344176-151344298_24 | − | chr1:151344210-151344235 | CCACCCCUGCCUGGACUUGACCUAA | 1385 |
| 5993_8::chr1:151344176-151344298_27 | − | chr1:151344224-151344249 | CCUUGGUGUCUAUGCCACCCCUGCC | 1386 |
| 5993_8::chr1:151344176-151344298_29 | − | chr1:151344246-151344271 | UACAGUGGCAUAAGGAGGAAGACCU | 1387 |
| 5993_8::chr1:151344176-151344298_31 | − | chr1:151344256-151344281 | CAGAUAUUGCUACAGUGGCAUAAGG | 1388 |
| 5993_8::chr1:151344176-151344298_35 | − | chr1:151344259-151344284 | CAUCAGAUAUUGCUACAGUGGCAUA | 1389 |
| 5993_8::chr1:151344176-151344298_39 | − | chr1:151344266-151344291 | UAACUUGCAUCAGAUAUUGCUACAG | 1390 |
| 5993_7::chr1:151344396-151344556_1 | + | chr1:151344397-151344422 | CCUCUCUAGUCAAGGAUACUUGGAC | 1391 |
| 5993_7::chr1:151344396-151344556_2 | + | chr1:151344403-151344428 | UAGUCAAGGAUACUUGGACUGGCCC | 1392 |
| 5993_7::chr1:151344396-151344556_7 | + | chr1:151344432-151344457 | CACCAAGCCUUCGAGCUUUGAUGUC | 1393 |
| 5993_7::chr1:151344396-151344556_9 | + | chr1:151344433-151344458 | ACCAAGCCUUCGAGCUUUGAUGUCA | 1394 |
| 5993_7::chr1:151344396-151344556_13 | + | chr1:151344464-151344489 | AUCUCUCUGAUGAUCUUGCCAAAGU | 1395 |
| 5993_7::chr1:151344396-151344556_16 | + | chr1:151344477-151344502 | UCUUGCCAAAGUUGGCUGUGCUGAG | 1396 |
| 5993_7::chr1:151344396-151344556_17 | + | chr1:151344478-151344503 | CUUGCCAAAGUUGGCUGUGCUGAGU | 1397 |
| 5993_7::chr1:151344396-151344556_18 | + | chr1:151344481-151344506 | GCCAAAGUUGGCUGUGCUGAGUGGG | 1398 |
| 5993_7::chr1:151344396-151344556_20 | + | chr1:151344488-151344513 | UUGGCUGUGCUGAGUGGGCGGCAAC | 1399 |
| 5993_7::chr1:151344396-151344556_27 | + | chr1:151344520-151344545 | ACUCUCACAGUACUUCCUGAGUGAG | 1400 |
| 5993_7::chr1:151344396-151344556_29 | + | chr1:151344521-151344546 | CUCUCACAGUACUUCCUGAGUGAGA | 1401 |
| 5993_7::chr1:151344396-151344556_31 | + | chr1:151344522-151344547 | UCUCACAGUACUUCCUGAGUGAGAG | 1402 |
| 5993_7::chr1:151344396-151344556_32 | − | chr1:151344400-151344425 | CCAGUCCAAGUAUCCUUGACUAGAG | 1403 |
| 5993_7::chr1:151344396-151344556_36 | − | chr1:151344428-151344453 | UCAAAGGUCGAAGGCUUGGUGGCCG | 1404 |
| 5993_7::chr1:151344396-151344556_37 | − | chr1:151344429-151344454 | AUCAAAGCUCGAAGGCUUGGUGGCC | 1405 |
| 5993_7::chr1:151344396-151344556_39 | − | chr1:151344430-151344455 | CAUCAAAGCUCGAAGGCUUGGUGGC | 1406 |
| 5993_7::chr1:151344396-151344556241 | − | chr1:151344434-151344459 | CUGACAUCAAAGCUCGAAGGCUUGG | 1407 |
| 5993_7::chr1:151344396-151344556_43 | − | chr1:151344437-151344462 | UCCCUGACAUCAAAGCUCGAAGGCU | 1408 |
| 5993_7::chr1:151344396-151344556_44 | − | chr1:151344442-151344467 | GAUCUUCCCUGACAUCAAAGCUCGA | 1409 |
| 5993_7::chr1:151344396-151344556_50 | − | chr1:151344485-151344510 | GCCGCCCACUCAGCACAGCCAACUU | 1410 |
| 5993_6::chr1:151344707-151344867_1 | + | chr1:151344728-151344753 | GAUAGGCAUCAUAAACACUUUGCUU | 1411 |
| 5993_6::chr1:151344707-151344867_2 | + | chr1:151344736-151344761 | UCAUAANCACUUUGCUUUGGCAGAC | 1412 |
| 5993_6::chr1:151344707-151344867_7 | + | chr1:151344756-151344781 | CAGACAGGUGUCAGUGUGCUCUUCC | 1413 |
| 5993_6::chr1:151344707-151344867_8 | + | chr1:151344759-151344784 | ACAGGUGUCAGUGUGCUCUUCCAGG | 1414 |
| 5993_6::chr1:151344707-151344867_10 | + | chr1:151344765-151344790 | GUCAGUGUGCUCUUCCAGGUGGUUG | 1415 |
| 5993_6::chr1:151344707-151344867_11 | + | chr1:151344778-151344803 | UCCAGGUGGUUGCGGAUCCACCUAU | 1416 |
| 5993_6::chr1:151344707-151344867_14 | + | chr1:151344812-151344837 | UGUACUCCUCAUUGCUCAGUGUACU | 1417 |
| 5993_6::chr1:151344707-151344867_20 | + | chr1:151344835-151344860 | CUUGGCUCUGAGCUACAGAAACAAA | 1418 |
| 5993_6::chr1:151344707-151344867_23 | − | chr1:151344710-151344735 | GCCUAUCGGUGGGUGGAGGGGUGGG | 1419 |
| 5993_6::chr1:151344707-151344867_24 | − | chr1:151344713-151344738 | GAUGCCUAUCGGUGGGUGGAGGGGU | 1420 |
| 5993_6::chr1:151344707-151344867_25 | − | chr1:151344714-151344739 | UGAUGCCUAUCGGUGGGUGGAGGGG | 1421 |
| 5993_6::chr1:151344707-151344867_28 | − | chr1:151344717-151344742 | UUAUGAUGCCUAUCGGUGGGUGGAG | 1422 |
| 5993_6::chr1:151344707-151344867_30 | − | chr1:151344718-151344743 | UUUAUGAUGCCUAUCGGUGGGUGGA | 1423 |
| 5993_6::chr1:151344707-151344867_32 | − | chr1:151344719-151344744 | GUUUAUGAUGCCUAUCGGUGGGUGG | 1424 |
| 5993_6::chr1:151344707-151344867_34 | − | chr1:151344722-151344747 | AGUGUUUAUGAUGCCUAUCGGUGGG | 1425 |
| 5993_6::chr1:151344707-151344867_37 | − | chr1:151344725-151344750 | CAAAGUGUUUAUGAUGCCUAUCGGU | 1426 |
| 5993_6::chr1:151344707-151344867_38 | − | chr1:151344726-151344751 | GCAAAGUGUUUAUGAUGCUAUCGG | 1427 |
| 5993_6::chr1:151344707-151344867_40 | − | chr1:151344729-151344754 | AAAGCAAAGUGUUUAUGAUGCCUAU | 1428 |
| 5993_6::chr1:151344707-151344867_42 | − | chr1:151344782-151344807 | GCCUAUAGGUGGAUCCGCAACCACC | 1429 |
| 5993_6::chr1:151344707-151344867_45 | − | chr1:151344798-151344823 | UGAGGAGUACAUGUAUGCCUAUAGG | 1430 |
| 5993_6::chr1:151344707-151344867_47 | − | chr1:151344801-151344826 | CAAUGAGGAGUACAUGUAUGCCUAU | 1431 |
| 5993_6::chr1:151344707-151344867_49 | − | chr1:151344821-151344846 | UCAGAGCCAAGUACACUGAGCAAUG | 1432 |
| 5993_5::chr1:151345085-151345208_1 | + | chr1:151345093-151345118 | UAUCAAACCUACCUUUUGUCUCCAG | 1433 |
| 5993_5::chr1:151345085-151345208_3 | + | chr1:151345096-151345121 | CAAACCUACCUUUUGUCUCCAGUGG | 1434 |
| 5993_5::chr1:151345085-151345208_4 | + | chr1:151345097-151345122 | AAACCUACCUUUUGUCUCCAGUGGU | 1435 |
| 5993_5::chr1:151345085-151345208_7 | + | chr1:151345105-151345130 | CUUUUGUCUCCAGUGGUGGGUCCUG | 1436 |
| 5993_5::chr1:151345085-151345208_9 | + | chr1:151345106-151345131 | UUUUGUCUCCAGUGGUGGGUCCUGA | 1437 |
| 5993_5::chr1:151345085-151345208_12 | + | chr1:151345107-151345132 | UUUGUCUCCAGUGGUGGGUCCUGAG | 1438 |
| 5993_5::chr1:151345085-151345208_17 | + | chr1:151345116-151345141 | AGUGGUGGGUCCUGAGGGGAGCUGA | 1439 |
| 5993_5::chr1:151345085-151345208_24 | + | chr1:151345166-151345191 | CAGAAAAUUUCUGUACAUCUUGCUG | 1440 |
| 5993_5::chr1:151345085-151345208_26 | + | chr1:151345170-151345195 | AAAUUUCUGUACAUCUUGCUGAGGU | 1441 |
| 5993_5::chr1:151345085-151345208_32 | − | chr1:151345103-151345128 | GGACCCACCACUGGAGACAAAAGGU | 1442 |
| 5993_5::chr1:151345085-151345208_33 | − | chr1:151345107-151345132 | CUCAGGACCCACCACUGGAGACAAA | 1443 |
| 5993_5::chr1:151345085-151345208_36 | − | chr1:151345117-151345142 | UUCAGCUCCCCUCAGGACCCACCAC | 1444 |
| 5993_5::chr1:151345085-151345208_38 | − | chr1:151345129-151345154 | UGUAUCUCUACCUUCAGCUCCCCUC | 1445 |
| 5993_4::chr1:151345907-151345981_3 | + | chr1:151345928-151345953 | AGGAUCCCCUCUACUUUGUUCUGCA | 1446 |
| 5993_4::chr1:151345907-151345981_5 | + | chr1:151345939-151345964 | UACUUUGUUCUGCACGGCCUUGCUG | 1447 |
| 5993_4::chr1:151345907-151345981_8 | + | chr1:151345940-151345965 | ACUUUGUUCUGCACGGCCUUGCUGU | 1448 |
| 5993_4::chr1:151345907-151345981_10 | + | chr1:151345941-151345966 | CUUUGUUCUGCACGGCCUUGCUGUG | 1449 |
| 5993_4::chr1:151345907-151345981_15 | + | chr1:151345947-151345972 | UCUGCACGGCCUUGCUGUGGGGAAG | 1450 |
| 5993_4::chr1:151345907-151345981_21 | − | chr1:151345915-151345940 | AGAGGGGAUCCUGGUAAGUGUGUUG | 1451 |
| 5993_4::chr1:151345907-151345981_24 | − | chr1:151345916-151345941 | UAGAGGGGAUCCUGGUAAGUGUGUU | 1452 |
| 5993_4::chr1:151345907-151345981_25 | − | chr1:151345917-151345942 | GUAGAGGGGAUCCUGGUAAGUGUGU | 1453 |
| 5993_4::chr1:151345907-151345981_28 | − | chr1:151345929-151345954 | GUGCAGAACAAAGUAGAGGGGAUCC | 1454 |
| 5993_4::chr1:151345907-151345981_29 | − | chr1:151345936-151345961 | CAAGGCCGUGCAGAACAAAGUAGAG | 1455 |
| 5993_4::chr1:151345907-151345981_30 | − | chr1:151345937-151345962 | GCAAGGCCGUGCAGAACAAAGUAGA | 1456 |
| 5993_4::chr1:151345907-151345981_33 | − | chr1:151345938-151345963 | AGCAAGGCCGUGCAGAACAAAGUAG | 1457 |
| 5993_3::chr1:151346184-151346353_2 | + | chr1:151346191-151346216 | GAUGAGUACUUACGAAAUGGUACCU | 1458 |
| 5993_3::chr1:151346184-151346353_8 | + | chr1:151346206-151346231 | AAUGGUACCUCGGAGCCUCUGAAGA | 1459 |
| 5993_3::chr1:151346184-151346353_9 | + | chr1:151346207-151346232 | AUGGUACCUCGGAGCCUCUGAAGAA | 1460 |
| 5993_3::chr1:151346184-151346353_10 | + | chr1:151346210-151346235 | GUACCUCGGAGCCUCUGAAGAAGGG | 1461 |
| 5993_3::chr1:151346184-151346353_11 | + | chr1:151346214-151346239 | CUCGGAGCCUCUGAAGAAGGGUGGU | 1462 |
| 5993_3::chr1:151346184-151346353_13 | + | chr1:151346238-151346263 | UAGGUUCCCCAGCCUCAGCACCACC | 1463 |
| 5993_3::chr1:151346184-151346353_16 | + | chr1:151346239-151346264 | AGGUUCCCCAGCCUCAGCACCACCU | 1464 |
| 5993_3::chr1:151346184-151346353_17 | + | chr1:151346240-151346265 | GGUUCCCCAGCCUCAGCACCACCUG | 1465 |
| 5993_3::chr1:151346184-151346353_20 | + | chr1:151346241-151346266 | GUUCCCCAGCCUCNGCACCACCUGG | 1466 |
| 5993_3::chr1:151346184-151346353_21 | + | chr1:151346242-151346267 | UUCCCCAGCCUCAGCACCACCUGGG | 1467 |
| 5993_3::chr1:151346184-151346353_22 | + | chr1:151346243-151346268 | UCCCCAGCCUCAGCACCACCUGGGG | 1468 |
| 5993_3::chr1:151346184-151346353_25 | + | chr1:151346261-151346286 | CCUGGGGGGGCCCUUCCCCCAGUCU | 1469 |
| 5993_3::chr1:151346184-151346353_27 | + | chr1:151346262-151346287 | CUGGGGGGGCCCUUCCCCCAGUCUU | 1470 |
| 5993_3::chr1:151346184-151346353_28 | + | chr1:151346263-151346288 | UGGGGGGGCCCUUCCCCCAGUCUUG | 1471 |
| 5993_3::chr1:151346184-151346353_29 | + | chr1:151346277-151346302 | CCCCAGUCUUGGGGCUCUUAGCAUC | 1472 |
| 5993_3::chr1:151346184-151346353_33 | + | chr1:151346297-151346322 | GCAUCAGGCUCAUCUUCUGCCAUCC | 1473 |
| 5993_3::chr1:151346184-151346353_36 | + | chr1:151346304-151346329 | GCUCAUCUUCUGCCAUCCCGGCAUG | 1474 |
| 5993_3::chr1:151346184-151346353_37 | + | chr1:151346305-151346330 | CUCAUCUUCUGCCAUCCCGGCAUGA | 1475 |
| 5993_3::chr1:151346184-151346353_45 | + | chr1:151346319-151346344 | UCCCGGCAUGAGGGCUAGAAUUGAG | 1476 |
| 5993_3::chr1:151346184-151346353_46 | + | chr1:151346320-151346345 | CCCGGCAUGAGGGCUAGAAUUGAGA | 1477 |
| 5993_3::chr1:151346184-151346353_47 | + | chr1:151346325-151346350 | CAUGAGGGCUAGAAUUGAGAGGGAC | 1478 |
| 5993_3::chr1:151346184-151346353_50 | − | chr1:151346216-151346241 | CUACCACCCUUCUUCAGAGGCUCCG | 1479 |
| 5993_3::chr1:151346184-151346353_52 | − | chr1:151346224-151346249 | UGGGGAACCUACCACCCUUCUUCAG | 1480 |
| 5993_3::chr1:151346184-151346353_54 | − | chr1:151346247-151346272 | GCCCCCCCAGGUGGUGCUGAGGCUG | 1481 |
| 5993_3::chr1:151346184-151346353_56 | − | chr1:151346248-151346273 | GGCCCCCCCAGGUGGUGCUGAGGCU | 1482 |
| 5993_3::chr1:151346184-151346353_59 | − | chr1:151346249-151346274 | GGGCCCCCCCAGGUGGUGCUGAGGC | 1483 |
| 5993_3::chr1:151346184-151346353_61 | − | chr1:151346253-151346278 | GGAAGGGCCCCCCCAGGUGGUGCUG | 1484 |
| 5993_3::chr1:151346184-151346353_63 | − | chr1:151346261-151346286 | AGACUGGGGGAAGGGCCCCCCCAGG | 1485 |
| 5993_3::curl:151346184-151346353_64 | − | chr1:151346264-151346289 | CCAAGACUGGGGGAAGGGCCCCCCC | 1486 |
| 5993_3::chr1:151346184-151346353_65 | − | chr1:151346274-151346299 | GCUAAGAGCCCCAAGACUGGGGGAA | 1487 |
| 5993_3::chr1:151346184-151346353_66 | − | chr1:151346275-151346300 | UGCUAAGAGCCCCAAGACUGGGGGA | 1488 |
| 5993_3::chr1:151346184-151346353_69 | − | chr1:151346279-151346304 | CUGAUGCUAAGAGCCCCAAGACUGG | 1489 |
| 5993_3::chr1:151346184-151346353_71 | − | chr1:151346280-151346305 | CCUGAUGCUAAGAGCCCCAAGACUG | 1490 |
| 5993_3::chr1:151346184-151346353_73 | − | chr1:151346281-151346306 | GCCUGAUGGUAAGAGCCCCAAGACU | 1491 |
| 5993_3::chr1:151346184-151346353_75 | − | chr1:151346282-151346307 | AGCCUGAUGCUAAGAGCCCCAAGAC | 1492 |
| 5993_3::chr1:151346184-151346353_82 | − | chr1:151346319-151346344 | CUCAAUUCUAGCCCUCAUGCCGGGA | 1491 |
| 5993_3::chr1:151346184-151346353_83 | − | chr1:151346323-151346348 | CCCUCUCAAUUCUAGCCCUCAUGCC | 1494 |
| 5993_3::chr1:151346184-151346353_84 | − | chr1:151346324-151346349 | UCCCUCUCAAUUCUAGCCCUCAUGC | 1495 |
| 5993_2::chr1:151346461-151346626_10 | − | chr1:151346500-151346525 | UUAGAAAUUAUUCCAUUACUUCGCC | 1496 |
| 5993_2::chr1:151346461-151346626_23 | + | chr1:151346574-151346599 | CCACCUUUCUGAAGUCUCCUAAAUC | 1497 |
| 5993_2::chr1:151346461-151346626_27 | + | chr1:151346587-151346612 | GUCUCCUAAAUCUGGAAAACUGUAA | 1498 |
| 5993_2::chr1:151346461-151346626_31 | + | chr1:151346597-151346622 | UCUGGAAAACUGUAAAGGAAGAGAU | 1499 |
| 5993_2::chr1:151346461-151346626_32 | + | chr1:151346598-151346623 | CUGGAAAACUGUAAAGGAAGAGAUA | 1500 |
| 5993_2::chr1:151346461-151346626_33 | − | chr1:151346464-151346489 | GGCAAGUGGUGAGAAAAAGACCACC | 1501 |
| 5993_2::chr1:151346461-151346626_34 | − | chr1:151346465-151346490 | AGGCAAGUGGUGAGAAAAAGACCAC | 1502 |
| 5993_2::chr1:151346461-151346626_43 | − | chr1:151346483-151346508 | AUUUCUAAUUUUCGGAGAAGGCAAG | 1503 |
| 5993_2::chr1:151346461-151346626_44 | − | chr1:151346490-151346515 | UGGAAUAAUUUCUAAUUUUCGGAGA | 1504 |
| 5993_2::chr1:151346461-151346626_48 | − | chr1:151346496-151346521 | AAGUAAUGGAAUAAUUUCUAAUUUU | 1505 |
| 5993_2::chr1:151346461-151346626_50 | − | chr1:151346515-151346540 | GGCAUAUAUGGGCCUGGCGAAGUAA | 1506 |
| 5993_2::chr1:151346461-151346626_56 | − | chr1:151346526-151346551 | AGAUCUCUUUGGGCAUAUAUGGGCC | 1507 |
| 5993_2::chr1:151346461-151346626_57 | − | chr1:151346531-151346556 | GGCAAAGAUCUCUUUGGGCAUAUAU | 1508 |
| 5993_2::chr1:151346461-151346626_58 | − | chr1:151346532-151346557 | UGGCAAAGAUCUCUUUGGGCAUAUA | 1509 |
| 5993_2::chr1:151346461-151346626_60 | − | chr1:151346541-151346566 | GAAUGGAGAUGGCAAAGAUCUCUUU | 1510 |
| 5993_2::chr1:151346461-151346626_61 | − | chr1:151346542-151346567 | AGAAUGGAGAUGGCAAAGAUCUCUU | 1511 |
| 5993_2::chr1:151346461-151346626_63 | − | chr1:151346557-151346582 | AAAGGUGGGGCAGAUAGAAUGGAGA | 1512 |
| 5993_2::chr1:151346461-151346626_65 | − | chr1:151346563-151346588 | CUUCAGAAAGGUGGGGCAGAUAGAA | 1513 |
| 5993_2::chr1:151346461-151346626_71 | − | chr1:151346575-151346600 | AGAUUUAGGAGACUUCAGAAAGGUG | 1514 |
| 5993_2::chr1:151346461-151346626_72 | − | chr1:151346576-151346601 | CAGAUUUAGGAGACUUCAGAAAGGU | 1515 |
| 5993_2::chr1:151346461-151346626_74 | − | chr1:151346577-151346602 | CCAGAUUUAGGAGACUUCAGAAAGG | 1516 |
| 5993_2::chr1:151346461-151346626_78 | − | chr1:151346580-151346605 | UUUCCAGAUUUAGGAGACUUCAGAA | 1517 |
| 5993_2::chr1:151346461-151346626_85 | − | chr1:151346594-151346619 | UCUUCCUUUACAGUUUUCCAGAUUU | 1518 |
| 5993_1::chr1:151347190-151347313_1 | + | chr1:151347217-151347242 | CCACCUUCACUCCAGCCCAGCCCCA | 1519 |
| 5993_1::chr1:151347190-151347313_2 | + | chr1:151347223-151347248 | UCACUCCAGCCCAGCCCCAAGGUCC | 1520 |
| 5993_1::chr1:151347190-151347313_4 | + | chr1:151347232-151347257 | CCCAGCCCCAAGGUCCUGGCCCAGC | 1521 |
| 5993_1::chr1:151347190-151347313_6 | + | chr1:151347267-151347292 | GUUGCUUUAUUUUCCUUUUUCUGAA | 1522 |
| 5993_1::chr1:151347190-151347313_17 | − | chr1:151347212-151347237 | CUGGGCUGGAGUGAAGGUGGCUACG | 1523 |
| 5993_1::chr1:151347190-151347313_20 | − | chr1:151347220-151347245 | CCUUGGGGCUGGGCUGGAGUGAAGG | 1524 |
| 5993_1::chr1:151347190-151347313_21 | − | chr1:151347223-151347248 | GGACCUUGGGGCUGGGCUGGAGUGA | 1525 |
| 5993_1::chr1:151347190-151347313_24 | − | chr1:151347231-151347256 | CUGGGCCAGGACCUUGGGGCUGGGC | 1526 |
| 5993_1::chr1:151347190-151347313_26 | − | chr1:151347235-151347260 | CCGGCUGGGCCAGGACCUUGGGGCU | 1527 |
| 5993_1::chr1:151347190-151347313_27 | − | chr1:151347236-151347261 | GCCGGCUGGGCCAGGACCUUGGGGC | 1528 |
| 5993_1::chr1:151347190-151347313_29 | − | chr1:151347240-151347265 | ACGAGCCGGCUGGGCCAGGACCUUG | 1529 |
| 5993_1::chr1:151347190-151347313_30 | − | chr1:151347241-151347266 | CACGAGCCGGCUGGGCCAGGACCUU | 1530 |
| 5993_1::chr1:151347190-151347313_31 | − | chr1:151347242-151347267 | GCACGAGCCGGCUGGGCCAGGACCU | 1531 |
| 5993_1::chr1:151347190-151347313_34 | − | chr1:151347249-151347274 | AAGCAACGCACGAGCCGGCUGGGCC | 1532 |
| 5993_1::chr1:151347190-151347313_36 | − | chr1:151347254-151347279 | AAAUAAAGCAACGCACGAGCCGGCU | 1533 |
| 5993_1::chr1:151347190-151347313_37 | − | chr1:151347255-151347280 | AAAAUAAAGCAACGCACGAGCCGGC | 1534 |
| 5993_1::chr1:151347190-151347313_39 | − | chr1:151347259-151347284 | AAGGAAAAUAAAGCAACGCACGAGC | 1535 |
| 5993_1::chr1:151347190-151347313_44 | − | chr1:151347283-151347308 | GCGGCUGUUACAACCAUUCAGAAAA | 1536 |

TABLE 1b
gRNA targeting domains for RFXAP, a molecule that regulates the expression of MHC II.

| | | Genomic location | | SEQ |
|---|---|---|---|---|
| | | (hg38) of target | gRNA | ID |
| RFXAP ID | Strand | sequence | targeting domain sequence^{a} | NO: |
| 5994_1::chr13:36819181-36819977_1 | + | chr13:36819181-36819206 | CGCGGGCGUACACACGCUGACGCGC | 1537 |
| 5994_1::chr13:36819181-36819977_2 | + | chr13:36819187-36819212 | CGUACACACGCUGACGCGCAGGCUG | 1538 |
| 5994_1::chr13:36819181-36819977_3 | + | chr13:36819196-36819221 | GCUGACGCGCAGGCUGCGGUCGCGC | 1539 |
| 5994_1::chr13:36819181-36819977_6 | + | chr13:36819205-36819230 | CAGGCUGCGGUCGCGCAGGCGCAGU | 1540 |
| 5994_1::chr13:36819181-36819977_7 | + | chr13:36819206-36819231 | AGGCUGCGGUCGCGCAGGCGCAGUC | 1541 |
| 5994_1::chr13:36819181-36819977_8 | + | chr13:36819207-36819232 | GGCUGCGGUCGCGCAGGCGCAGUCG | 1542 |
| 5994_1::chr13:36819181-36819977_9 | + | chr13:36819218-36819243 | CGCAGGCGCAGUCGGGGCGCCUUCC | 1543 |
| 5994_1::chr13:36819181-36819977_10 | + | chr13:36819224-36819249 | CGCAGUCGGGGCGCCUUCCCGGUAU | 1544 |
| 5994_1::chr13:36819181-36819977_13 | + | chr13:36819257-36819282 | UUUACCCCAGCGUGUCCUGAGUCUU | 1545 |
| 5994_1::chr13:36819181-36819977_18 | + | chr13:36819276-36819301 | AGUCUUUGGUUCGCGAAGUGCCGUU | 1546 |
| 5994_1::chr13:36819181-36819977_21 | + | chr13:36819285-36819310 | UUCGCGAAGUGCCGUUAGGCCAAGC | 1547 |
| 5994_1::chr13:36819181-36819977_24 | + | chr13:36819299-36819324 | UUAGGCCAAGCAGGUGCUAAAAGCC | 1548 |
| 5994_1::chr13:36819181-36819977_26 | + | chr13:36819300-36819325 | UAGGCCAAGCAGGUGCUAAAAGCCC | 1549 |
| 5994_1::chr13:36819181-36819977_27 | + | chr13:36819301-36819326 | AGGCCAAGCAGGUGCUAAAAGCCCG | 1550 |
| 5994_1::chr13:36819181-36819977_30 | + | chr13:36819307-36819332 | AGCAGGUGCUAAAAGCCCGGGGUCG | 1551 |
| 5994_1::chr13:36819181-36819977_31 | + | chr13:36819314-36819339 | GCUAAAAGCCCGGGGUCGUGGACCC | 1552 |
| 5994_1::chr13:36819181-36819977_32 | + | chr13:36819319-36819344 | AAGCCCGGGGUCGUGGACCCCGGCC | 1553 |
| 5994_1::chr13:36819181-36819977_35 | + | chr13:36819333-36819358 | GGACCCCGGCCAGGUCUUAGCAGCA | 1554 |
| 5994_1::chr13:36819181-36819977_36 | + | chr13:36819336-36819361 | CCCCGGCCAGGUCUUAGCAGCAUGG | 1555 |
| 5994_1::chr13:36819181-36819977_38 | + | chr13:36819342-36819367 | CCAGGUCUUAGCAGCAUGGAGGCGC | 1556 |
| 5994_1::chr13:36819181-36819977_39 | + | chr13:36819343-36819368 | cagguCUUAGCAGCAUGGAGGCGCA | 1557 |
| 5994_1::chr13:36819181-36819977_42 | + | chr13:36819351-36819376 | AGCAGCAUGGAGGCGCAGGGUGUAG | 1558 |
| 5994_1::chr13:36819181-36819977_45 | + | chr13:36819354-36819379 | AGCAUGGAGGCGCAGGGUGUAGCGG | 1559 |
| 5994_1::chr13:36819181-36819977_46 | + | chr13:36819355-36819380 | GCAUGGAGGCGCAGGGUGUAGCGGA | 1560 |
| 5994_1::chr13:36819181-36819977_49 | + | chr13:36819360-36819385 | GAGGCGCAGGGUGUAGCGGAGGGCG | 1561 |
| 5994_1::chr13:36819181-36819977_50 | + | chr13:36819361-36819386 | AGGCGCAGGGUGUAGCGGAGGGCGC | 1562 |
| 5994_1::chr13:36819181-36819977_51 | + | chr13:36819362-36819387 | GGCGCAGGGUGUAGCGGAGGGCGCG | 1563 |
| 5994_1::chr13:36819181-36819977_53 | + | chr13:36819366-36819391 | CAGGGUGUAGCGGAGGGCGCGGGGC | 1564 |
| 5994_1::chr13:36819181-36819977_54 | + | chr13:36819367-36819392 | AGGGUGUAGCGGAGGGCGCGGGGCC | 1565 |
| 5994_1::chr13:36819181-36819977_55 | + | chr13:36819379-36819404 | AGGGCGCGGGGCCGGGCGCCGCCAG | 1566 |
| 5994_1::chr13:36819181-36819977_56 | + | chr13:36819396-36819421 | GCCGCCAGCGGCGUGCCCCACCCCG | 1567 |
| 5994_1::chr13:36819181-36819977_57 | + | chr13:36819408-36819433 | GUGCCCCACCCCGCGGCCCUAGCCC | 1568 |
| 5994_1::chr13:36819181-36819977_58 | + | chr13:36819414-36819439 | CACCCCGCGGCCCUAGCCCCGGCUG | 1569 |
| 5994_1::chr13:36819181-36819977_59 | + | chr13:36819426-36819451 | CUAGCCCCGGCUGCGGCUCCCACCU | 1570 |
| 5994_1::chr13:36819181-36819977_60 | + | chr13:36819438-36819463 | GCGGCUCCCACCUUGGCGCCAGCCU | 1571 |
| 5994_1::chr13:36819181-36819977_61 | + | chr13:36819441-36819466 | GCUCCCACCUUGGCGCCAGCCUCGG | 1572 |
| 5994_1::chr13:36819181-36819977_62 | + | chr13:36819444-36819469 | CCCACCUUGGCGCCAGCCUCGGUGG | 1573 |
| 5994_1::chr13:36819181-36819977_63 | + | chr13:36819450-36819475 | UUGGCGCCAGCCUCGGUGGCGGCCG | 1574 |
| 5994_1::chr13:36819181-36819977_67 | + | chr13:36819490-36819515 | CCCUGCUAGUGAUGCAACCCUGUGC | 1575 |
| 5994_1::chr13:36819181-36819977_68 | − | chr13:36819491-36819516 | CCUGCUAGUGAUGCAACCCUGUGCU | 1576 |
| 5994_1::chr13:36819181-36819977_70 | + | chr13:36819495-36819520 | CUAGUGAUGCAACCCUGUGCUGGGC | 1577 |
| 5994_1::chr13:36819181-36819977_72 | + | chr13:36819501-36819526 | AUGCAACCCUGUGCUGGGCAGGACG | 1578 |
| 5994_1::chr13:36819181-36819977_73 | + | chr13:36819507-36819532 | CCCUGUGCUGGGCAGGACGAGGCUG | 1579 |
| 5994_1::chr13:36819181-36819977_76 | + | chr13:36819514-36819539 | CUGGGCAGGACGAGGCUGCGGCCCC | 1580 |
| 5994_1::chr13:36819181-36819977_77 | + | chr13:36819515-36819540 | UGGGCAGGACGAGGCUGCGGCCCCC | 1581 |
| 5994_1::chr13:36819181-36819977_79 | + | chr13:36819516-36819541 | GGGCAGGACGAGGCUGCGGCCCCCG | 1582 |
| 5994_1::chr13:36819181-36819977_80 | + | chr13:36819517-36819542 | GGCAGGACGAGGCUGCGGCCCCCGG | 1583 |
| 5994_1::chr13:36819181-36819977_82 | + | chr13:36819526-36819551 | AGGCUCCGGCCCCCGGGGGCAGCGU | 1584 |
| 5994_1::chr13:36819181-36819977_84 | + | chr13:36819527-36819552 | GGCUGCGGCCCCCGGGGGCAGCGUU | 1585 |
| 5994_1::chr13:36819181-36819977_85 | + | chr13:36819528-36819553 | GCUGCGGCCCCCGGGGGCAGCGUUG | 1586 |
| 5994_1::chr13:36819181-36819977_87 | + | chr13:36819531-36819556 | GCGGCCCCCGGGGGCAGCGUUGGGG | 1587 |
| 5994_1::chr13:36819181-36819977_88 | + | chr13:36819532-36819557 | CGGCCCCCGGGGGCAGCGUUGGGGC | 1588 |
| 5994_1::chr13:36819181-36819977_89 | + | chr13:36819545-36819570 | CAGCGUUGGGGCGGGCAAGCCCGUU | 1589 |
| 5994_1::chr13:36819181-36819977_94 | + | chr13:36819559-36819584 | GCAAGCCCGUUAGGUACCUGUGCGA | 1590 |
| 5994_1::chr13:36819181-36819977_95 | + | chr13:36819560-36819585 | CAAGCCCGUUAGGUACCUGUGCGAA | 1591 |
| 5994_1::chr13:36819181-36819977_96 | + | chr13:36819561-36819586 | AAGCCCGUUAGGUACCUGUGCGAAG | 1592 |
| 5994_1::chr13:36819181-36819977_98 | + | chr13:36819565-36819590 | CCGUUAGGUACCUGUGCGAAGGGGC | 1593 |
| 5994_1::chr13:36819181-36819977_101 | + | chr13:36819566-36819591 | CGUUAGGUACCUGUGCGAAGGGGCC | 1594 |
| 5994_1::chr13:36819181-36819977_102 | + | chr13:36819567-36819592 | GUUAGGUACCUGUGCGAAGGGGCCG | 1595 |
| 5994_1::chr13:36819181-36819977_103 | + | chr13:36819571-36819596 | GGUACCUGUGCGAAGGGGCCGGGGA | 1596 |
| 5994_1::chr13:36819181-36819977_108 | + | chr13:36819579-36819604 | UGCGAAGGGGCCGGGGAUGGCGAAG | 1597 |
| 5994_1::chr13:36819181-36819977_110 | + | chr13:36819582-36819607 | GAAGGGGCCGGGGAUGGCGAAGAGG | 1598 |
| 5994_1::chr13:36819181-36819977_112 | + | chr13:36819586-36819611 | GGGCCGGGGAUGGCGAAGAGGAGGC | 1599 |
| 5994_1::chr13:36819181-36819977_114 | + | chr13:36819587-36819612 | GGCCGGGGAUGGCGAAGAGGAGGCU | 1600 |
| 5994_1::chr13:36819181-36819977_116 | + | chr13:36819588-36819613 | GCCGGGGAUGGCGAAGAGGAGGCUG | 1601 |
| 5994_1::chr13:36819181-36819977_119 | + | chr13:36819591-36819616 | GGGGAUGGCGAAGAGGAGGCUGGGG | 1602 |
| 5994_1::chr13:36819181-36819977_121 | + | chr13:36819597-36819622 | GGCGAAGAGGAGGCUGGGGAGGACG | 1603 |
| 5994_1::chr13:36819181-36819977_123 | + | chr13:36819600-36819625 | GAAGAGGAGGCUGGGGAGGACGAGG | 1604 |
| 5994_1::chr13:36819181-36819977_125 | + | chr13:36819618-36819643 | GACGAGGCGGACCUGUUAGACACUU | 1605 |
| 5994_1::chr13:36819181-36819977_127 | + | chr13:36819627-36819652 | GACCUGUUAGACACUUCGGACCCUC | 1606 |
| 5994_1::chr13:36819181-36819977_129 | + | chr13:36819628-36819653 | ACCUGUUAGACACUUCGGACCCUCC | 1607 |
| 5994_1::chr13:36819181-36819977_132 | + | chr13:36819629-36819654 | CCUGUUAGACACUUCGGACCCUCCG | 1608 |
| 5994_1::chr13:36819181-36819977_134 | + | chr13:36819630-36819655 | CUGUUAGACACUUCGGACCCUCCGG | 1609 |
| 5994_1::chr13:36819181-36819977_135 | + | chr13:36819631-36819656 | UGUUAGACACUUCGGACCCUCCGGG | 1610 |
| 5994_1::chr13:36819181-36819977_137 | + | chr13:36819634-36819659 | UAGACACUUCGGACCCUCCGGGGGG | 1611 |
| 5994_1::chr13:36819181-36819977_142 | + | chr13:36819645-36819670 | GACCCUCCGGGGGGAGGCGAGAGCG | 1612 |
| 5994_1::chr13:36819181-36819977_144 | + | chr13:36819654-36819679 | GGGGGAGGCGAGAGCGCGGCUAGUU | 1613 |
| 5994_1::chr13:36819181-36819977_147 | + | chr13:36819657-36819682 | GGAGGCGAGAGCGCGGCUAGUUUGG | 1614 |
| 5994_1::chr13:36819181-36819977_150 | + | chr13:36819666-36819691 | AGCGCGGCUAGUUUGGAGGAUCUAG | 1615 |
| 5994_1::chr13:36819181-36819977_154 | + | chr13:36819672-36819697 | GCUAGUUUGGAGGAUCUAGAGGACG | 1616 |
| 5994_1::chr13:36819181-36819977_158 | + | chr13:36819684-36819709 | GAUCUAGAGGACGAGGAGACUCACU | 1617 |
| 5994_1::chr13:36819181-36819977_161 | + | chr13:36819685-36819710 | AUCUAGAGGACGAGGAGACUCACUC | 1618 |
| 5994_1::chr13:36819181-36819977_163 | + | chr13:36819686-36819711 | ucuagAGGACGAGGAGACUCACUCG | 1619 |
| 5994_1::chr13:36819181-36819977_164 | + | chr13:36819687-36819712 | cuagAGGACGAGGAGACUCACUCGg | 1620 |
| 5994_1::chr13:36819181-36819977_165 | + | chr13:36819688-36819713 | uagAGGACGAGGAGACUCACUCGgg | 1621 |
| 5994_1::chr13:36819181-36819977_168 | + | chr13:36819693-36819718 | GACGAGGAGACUCACUCGGGGGGCG | 1622 |
| 5994_1::chr13:36819181-36819977_169 | + | chr13:36819694-36819719 | ACGAGGAGACUCACUCGGGGGGCGA | 1623 |
| 5994_1::chr13:36819181-36819977_172 | + | chr13:36819703-36819728 | CUCACUCGGGGGGCGAGGGCAGCAG | 1624 |
| 5994_1::chr13:36819181-36819977_173 | + | chr13:36819704-36819729 | UCACUCGGGGGGCGAGGGCAGCAGC | 1625 |
| 5994_1::chr13:36819181-36819977_175 | + | chr13:36819705-36819730 | CACUCGGGGGGCGAGGGCAGCAGCG | 1626 |
| 5994_1::chr13:36819181-36819977_176 | + | chr13:36819706-36819731 | ACUCGGGGGGCGAGGGCAGCAGCGC | 1627 |
| 5994_1::chr13:36819181-36819977_179 | + | chr13:36819713-36819738 | GGGCGAGGGCAGCAGCGGGGGCGCC | 1628 |
| 5994_1::chr13:36819181-36819977_180 | + | chr13:36819716-36819741 | CGAGGGCAGCAGCGGGGGCGCCCGG | 1629 |
| 5994_1::chr13:36819181-36819977_182 | + | chr13:36819719-36819744 | GGGCAGCAGCGGGGGCGCCCGGAGG | 1630 |
| 5994_1::chr13:36819181-36819977_184 | + | chr13:36819720-36819745 | GGCAGCAGCGGGGGCGCCCGGAGGC | 1631 |
| 5994_1::chr13:36819181-36819977_185 | + | chr13:36819721-36819746 | GCAGCAGCGGGGGCGCCCGGAGGCG | 1632 |
| 5994_1::chr13:36819181-36819977_186 | + | chr13:36819727-36819752 | GCGGGGGCGCCCGGAGGCGGGGCAG | 1633 |
| 5994_1::chr13:36819181-36819977_188 | + | chr13:36819730-36819755 | GGGGCGCCCGGAGGCGGGGCAGCGG | 1634 |
| 5994_1::chr13:36819181-36819977_190 | + | chr13:36819731-36819756 | GGGCGCCCGGAGGCGGGGCAGCGGU | 1635 |
| 5994_1::chr13:36819181-36819977_192 | + | chr13:36819732-36819757 | GGCGCCCGGAGGCGGGGCAGCGGUG | 1636 |
| 5994_1::chr13:36819181-36819977_193 | + | chr13:36819733-36819758 | GCGCCCGGAGGCGGGGCAGCGGUGG | 1637 |
| 5994_1::chr13:36819181-36819977_196 | + | chr13:36819763-36819788 | GCAUGAGCAAGACCUGCACCUACGA | 1638 |
| 5994_1::chr13:36819181-36819977_199 | + | chr13:36819786-36819811 | GAAGGCUGCAGCGAGACCACGAGCC | 1639 |
| 5994_1::chr13:36819181-36819977_200 | + | chr13:36819789-36819814 | GGCUGCAGCGAGACCACGAGCCAGG | 1640 |
| 5994_1::chr13:36819181-36819977_202 | + | chr13:36819809-36819834 | ccaggUGGCCAAGCAGCGCAAACCG | 1641 |
| 5994_1::chr13:36819181-36819977_206 | + | chr13:36819843-36819868 | AAGAAACACCGCAACAAGAUGUACA | 1642 |
| 5994_1::chr13:36819181-36819977_210 | + | chr13:36819873-36819898 | AAGUAUAAAAAGAAGAAGAGCGACC | 1643 |
| 5994_1::chr13:36819181-36819977_212 | + | chr13:36819886-36819911 | AGAAGAGCGACCAGGCCCUGAACUG | 1644 |
| 5994_1::chr13:36819181-36819977_214 | + | chr13:36819889-36819914 | AGAGCGACCAGGCCCUGAACUGCGG | 1645 |
| 5994_1::chr13:36819181-36819977_216 | + | chr13:36819890-36819915 | GAGCGACCAGGCCCUGAACUGCGGU | 1646 |
| 5994_1::chr13:36819181-36819977_217 | + | chr13:36819904-36819929 | UGAACUGCGGUGGGACUGCCUCGAC | 1647 |
| 5994_1::chr13:36819181-36819977_220 | + | chr13:36819912-36819937 | GGUGGGACUGCCUCGACUGGCAGCG | 1648 |
| 5994_1::chr13:36819181-36819977_221 | + | chr13:36819913-36819938 | GUGGGACUGCCUCGACUGGCAGCGC | 1649 |
| 5994_1::chr13:36819181-36819977_224 | + | chr13:36819930-36819955 | GGCAGCGCGGGAAACGUCAAACUCG | 1650 |
| 5994_1::chr13:36819181-36819977_226 | + | chr13:36819948-36819973 | AAACUCGAGGUAUCAGACUUAGCUG | 1651 |
| 5994_1::chr13:36819181-36819977_227 | − | chr13:36819240-36819265 | GGGGUAAAAGGCGCCUAUACCGGGA | 1652 |
| 5994_1::chr13:36819181-36819977_228 | − | chr13:36819244-36819269 | CGCUGGGGUAAAAGGCGCCUAUACC | 1653 |
| 5994_1::chr13:36819181-36819977_230 | − | chr13:36819245-36819270 | ACGCUGGGGUAAAAGGCGCCUAUAC | 1654 |
| 5994_1::chr13:36819181-36819977_233 | − | chr13:36819257-36819282 | AAGACUCAGGACACGCUGGGGUAAA | 1655 |
| 5994_1::chr13:36819181-36819977_234 | − | chr13:36819264-36819289 | CGAACCAAAGACUCAGGACACGCUG | 1656 |
| 5994_1::chr13:36819181-36819977_235 | − | chr13:36819265-36819290 | GCGAACCAAAGACUCAGGACACGCU | 1657 |
| 5994_1::chr13:36819181-36819977_236 | − | chr13:36819266-36819291 | CGCGAACCAAAGACUCAGGACACGC | 1658 |
| 5994_1::chr13:36819181-36819977_240 | − | chr13:36819275-36819300 | ACGGCACUUCGCGAACCAAAGACUC | 1659 |
| 5994_1::chr13:36819181-36819977_247 | − | chr13:36819299-36819324 | GGCUUUUAGCACCUGCUUGGCCUAA | 1660 |
| 5994_1::chr13:36819181-36819977_248 | − | chr13:36819307-36819332 | CGACCCCGGGCUUUUAGCACCUGCU | 1661 |
| 5994_1::chr13:36819181-36819977_249 | − | chr13:36819325-36819350 | AGACCUGGCCGGGGUCCACGACCCC | 1662 |
| 5994_1::chr13:36819181-36819977_250 | − | chr13:36819326-36819351 | AAGACCUGGCCGGGGUCCACGACCC | 1663 |
| 5994_1::chr13:36819181-36819977_252 | − | chr13:36819339-36819364 | CCUCCAUGCUGCUAAGACCUGGCCG | 1664 |
| 5994_1::chr13:36819181-36819977_253 | − | chr13:36819340-36819365 | GCCUCCAUGCUGCUAAGACCUGGCC | 1665 |
| 5994_1::chr13:36819181-36819977_255 | − | chr13:36819341-36819366 | CGCCUCCAUGCUGCUAAGACCUGGC | 1666 |
| 5994_1::chr13:36819181-36819977_257 | − | chr13:36819345-36819370 | CCUGCGCCUCCAUGCUGCUAAGACC | 1667 |
| 5994_1::chr13:36819181-36819977_258 | − | chr13:36819393-36819418 | GGUGGGGCACGCCGCUGGCGGCGCC | 1668 |
| 5994_1::chr13:36819181-36819977_259 | − | chr13:36819400-36819425 | GCCGCGGGGUGGGGCACGCCGCUGG | 1669 |
| 5994_1::chr13:36819181-36819977_260 | − | chr13:36819403-36819428 | AGGGCCGCGGGGUGGGGCACGCCGC | 1670 |
| 5994_1::chr13:36819181-36819977_261 | − | chr13:36819414-36819439 | CAGCCGGGGCUAGGGCCGCGGGGUG | 1671 |
| 5994_1::chr13:36819181-36819977_262 | − | chr13:36819415-36819440 | GCAGCCGGGGCUAGGGCCGCGGGGU | 1672 |
| 5994_1::chr13:36819181-36819977_263 | − | chr13:36819416-36819441 | CGCAGCCGGGGCUAGGGCCGCGGGG | 1673 |
| 5994_1::chr13:36819181-36819977_266 | − | chr13:36819419-36819444 | AGCCGCAGCCGGGGCUAGGGCCGCG | 1674 |
| 5994_1::chr13:36819181-36819977_267 | − | chr13:36819420-36819445 | GAGCCGCAGCCGGGGCUAGGGCCGC | 1675 |
| 5994_1::chr13:36819181-36819977_269 | − | chr13:36819421-36819446 | GGAGCCGCAGCCGGGGCUAGGGCCG | 1676 |
| 5994_1::chr13:36819181-36819977_271 | − | chr13:36819427-36819452 | AAGGUGGGAGCCGCAGCCGGGGCUA | 1677 |
| 5994_1::chr13:36819181-36819977_272 | − | chr13:36819428-36819453 | CAAGGUGGGAGCCGCAGCCGGGGCU | 1678 |
| 5994_1::chr13:36819181-36819977_274 | − | chr13:36819433-36819458 | GGCGCCAAGGUGGGAGCCGCAGCCG | 1679 |
| 5994_1::chr13:36819181-36819977_275 | − | chr13:36819434-36819459 | UGGCGCCAAGGUGGGAGCCGCAGCC | 1680 |
| 5994_1::chr13:36819181-36819977_276 | − | chr13:36819435-36819460 | CUGGCGCCAAGGUGGGAGCCGCAGC | 1681 |
| 5994_1::chr13:36819181-36819977_280 | − | chr13:36819447-36819472 | CCGCCACCGAGGCUGGCGCCAAGGU | 1682 |
| 5994_1::chr13:36819181-36819977_281 | − | chr13:36819448-36819473 | GCCGCCACCGAGGCUGGCGCCAAGG | 1683 |
| 5994_1::chr13:36819181-36819977_284 | − | chr13:36819451-36819476 | GCGGCCGCCACCGAGGCUGGCGCCA | 1684 |
| 5994_1::chr13:36819181-36819977_285 | − | chr13:36819459-36819484 | GAGAGGCCGCGGCCGCCACCGAGGC | 1685 |
| 5994_1::chr13:36819181-36819977_287 | − | chr13:36819463-36819488 | AAUUGAGAGGCCGCGGCCGCCACCG | 1686 |
| 5994_1::chr13:36819181-36819977_289 | − | chr13:36819475-36819500 | ACUAGCAGGGUGAAUUGAGAGGCCG | 1687 |
| 5994_1::chr13:36819181-36819977_290 | − | chr13:36819481-36819506 | UGCAUCACUAGCAGGGUGAAUUGAG | 1688 |
| 5994_1::chr13:36819181-36819977_295 | − | chr13:36819493-36819518 | ccagcACAGGGUUGCAUCACUAGCA | 1689 |
| 5994_1::chr13:36819181-36819977_296 | − | chr13:36819494-36819519 | CCCAGCACAGGGUUGCAUCACUAGC | 1690 |
| 5994_1::chr13:36819181-36819977_298 | − | chr13:36819510-36819535 | CCGCAGCCUCGUCCUGCCCAGCACA | 1691 |
| 5994_1::chr13:36819181-36819977_299 | − | chr13:36819511-36819536 | GCCGCAGCCUCGUCCUGCCCAGCAC | 1692 |
| 5994_1::chr13:36819181-36819977_302 | − | chr13:36819538-36819563 | UUGCCCGCCCCAACGCUGCCCCCGG | 1693 |
| 5994_1::chr13:36819181-36819977_303 | − | chr13:36819539-36819564 | CUUGCCCGCCCCAACGCUGCCCCCG | 1694 |
| 5994_1::chr13:36819181-36819977_305 | − | chr13:36819540-36819565 | GCUUGCCCGCCCCAACGCUGCCCCC | 1695 |
| 5994_1::chr13:36819181-36819977_307 | − | chr13:36819541-36819566 | GGCUUGCCCGCCCCAACGCUGCCCC | 1696 |
| 5994_1::chr13:36819181-36819977_310 | − | chr13:36819567-36819592 | CGGCCCCUUCGCACAGGUACCUAAC | 1697 |
| 5994_1::chr13:36819181-36819977_311 | − | chr13:36819568-36819593 | CCGGCCCCUUCGCACAGGUACCUAA | 1698 |
| 5994_1::chr13:36819181-36819977_314 | − | chr13:36819578-36819603 | UUCGCCAUCCCCGGCCCCUUCGCAC | 1699 |
| 5994_1::chr13:36819181-36819977_315 | − | chr13:36819592-36819617 | UCCCCAGCCUCCUCUUCGCCAUCCC | 1700 |
| 5994_1::chr13:36819181-36819977_316 | − | chr13:36819632-36819657 | CCCCGGAGGGUCCGAAGUGUCUAAC | 1701 |
| 5994_1::chr13:36819181-36819977_318 | − | chr13:36819650-36819675 | AGCCGCGCUCUCGCCUCCCCCCGGA | 1702 |
| 5994_1::chr13:36819181-36819977_319 | − | chr13:36819651-36819676 | UAGCCGCGCUCUCGCCUCCCCCCGG | 1703 |
| 5994_1::chr13:36819181-36819977_321 | − | chr13:36819654-36819679 | AACUAGCCGCGCUCUCGCCUCCCCC | 1704 |
| 5994_1::chr13:36819181-36819977_326 | − | chr13:36819739-36819764 | CUGCCCCCACCGCUGCCCCGCCUCC | 1705 |
| 5994_1::chr13:36819181-36819977_327 | − | chr13:36819740-36819765 | GCUGCCCCCACCGCUGCCCCGCCUC | 1706 |
| 5994_1::chr13:36819181-36819977_331 | − | chr13:36819778-36819803 | GUCUCGCUGCAGCCUUCGUAGGUGC | 1707 |
| 5994_1::chr13:36819181-36819977_332 | − | chr13:36819784-36819809 | CUCGUGGUCUCGCUGCAGCCUUCGU | 1708 |
| 5994_1::chr13:36819181-36819977_335 | − | chr13:36819805-36819830 | UUGCGCUGCUUGGCCACCUGGCUCG | 1709 |
| 5994_1::chr13:36819181-36819977_337 | − | chr13:36819812-36819837 | CCACGGUUUGCGCUGCUUGGCCACC | 1710 |
| 5994_1::chr13:36819181-36819977_339 | − | chr13:36819820-36819845 | UUGCACAUCCACCGUUUGCGCUGCU | 1711 |
| 5994_1::chr13:36819181-36819977_343 | − | chr13:36819834-36819859 | UGUUGCGGUGUUUCUUGCACAUCCA | 1712 |
| 5994_1::chr13:36819181-36819977_347 | − | chr13:36819854-36819879 | AUACUUGUCCUUGUACAUCUUGUUG | 1713 |
| 5994_1::chr13:36819181-36819977_355 | − | chr13:36819899-36819924 | GGCAGUCCCACCGCAGUUCAGGGCC | 1714 |
| 5994_1::chr13:36819181-36819977_356 | − | chr13:36819904-36819929 | GUCGAGGCAGUCCCACCGCAGUUCA | 1715 |
| 5994_1::chr13:36819181-36819977_357 | − | chr13:36819905-36819930 | AGUCGAGGCAGUCCCACCGCAGUUC | 1716 |
| 5994_1::chr13:36819181-36819977_363 | − | chr13:36819925-36819950 | UUGACGUUUCCCGCGCUGCCAGUCG | 1717 |
| 5994_2::chr13:36825407-36825555_9 | + | chr13:36825443-36825468 | UACUCUCCAUUGUUAAACAAAGAAC | 1718 |
| 5994_2::chr13:36825407-36825555_11 | + | chr13:36825452-36825477 | UUGUUAAACAAAGAACAGGAUCUUU | 1719 |
| 5994_2::chr13:36825407-36825555_14 | + | chr13:36825453-36825478 | UGUUAAACAAAGAACAGGAUCUUUU | 1720 |
| 5994_2::chr13:36825407-36825555_15 | + | chr13:36825454-36825479 | GUUAAACAAAGAACAGGAUCUUUUG | 1721 |
| 5994_2::chr13:36825407-36825555_25 | + | chr13:36825508-36825533 | GAACAAGUGUUAAAUCAAAAAAGAC | 1722 |
| 5994_2::chr13:36825407-36825555_28 | − | chr13:36825425-36825450 | GAGAGUAUGUUAUCUGCACUUUCCU | 1723 |
| 5994_2::chr13:36825407-36825555_30 | − | chr13:36825426-36825451 | GGAGAGUAUGLUAUCUGCACUUUCC | 1724 |
| 5994_2::chr13:36825407-36825555_38 | − | chr13:36825452-36825477 | AAAGAUCCUGUUCUUUGUUUAACAA | 1725 |
| 5994_2::chr13:36825407-36825555_44 | − | chr13:36825490-36825515 | CUUGUUCUAAAAGAGUAGGUCUUGC | 1726 |
| 5994_2::chr13:36825407-36825555_48 | − | chr13:36825499-36825524 | GAUUUAACACUUGUUCUAAAAGAGU | 1727 |
| 5994_3::chr13:36827622-36829623_21 | + | chr13:36827687-36827712 | CAACAGCUAUUAAAUCAGCAAGUUU | 1728 |
| 5994_3::chr13:36827622-36829623_27 | + | chr13:36827712-36827737 | UGGAGCAAAGACAACAGCAGUUUCC | 1729 |
| 5994_3::chr13:36827622-36829623_32 | + | chr13:36827727-36827752 | AGCAGUUUCCAGGAACAUCAAUGUG | 1730 |
| 5994_3::chr13:36827622-36829623_34 | + | chr13:36827728-36827753 | GCACUUUCCAGGAACAUCAAUGUGA | 1731 |
| 5994_3::chr13:36827622-36829623_39 | + | chr13:36827752-36827777 | AGGGAACUUACCAAGAACAUCUACA | 1732 |
| 5994_3::chr13:36827622-36829623_50 | + | chr13:36827804-36827829 | AGCAUAUUUUUUUACCAGACAUAAA | 1733 |
| 5994_3::chr13:36827622-36829623_52 | + | chr13:36827805-36827830 | GCAUAUUUUUUUACCAGACAUAAAU | 1734 |
| 5994_3::chr13:36827622-36829623_53 | + | chr13:36827806-36827831 | CAUAUUUUUUUACCAGACAUAAAUG | 1735 |
| 5994_3::chr13:36827622-36829623_62 | + | chr13:36827864-36827889 | UUUCCUGUAAAUGUAUGUGUGCAUU | 1736 |
| 5994_3::chr13:36827622-36829623_65 | + | chr13:36827865-36827890 | UUCCUGUAAAUGUAUGUGUGCAUUU | 1737 |
| 5994_3::chr13:36827622-36829623_66 | + | chr13:36827866-36827891 | UCCUGUAAAUGUAUGUGUGCAUUUG | 1738 |
| 5994_3::chr13:36827622-36829623_95 | + | chr13:36828004-36828029 | AUUCCUCUUCAGUCAUUGUUACUGA | 1739 |
| 5994_3::chr13:36827622-36829623_103 | + | chr13:36828028-36828053 | AAGGUAAUGAAGCAGUUACUUUCUG | 1740 |
| 5994_3::chr13:36827622-36829623_108 | + | chr13:36828076-36828101 | AUUAAUCUUGACUCAUCUAGCUCAG | 1741 |
| 5994_3::chr13:36827622-36829623_112 | + | chr13:36828088-36828113 | UCAUCUAGCUCAGUGGUUCUCAUCA | 1742 |
| 5994_3::chr13:36827622-36829623_113 | + | chr13:36828089-36828114 | CAUCUAGCUCAGUGGUUCUCAUCAA | 1743 |
| 5994_3::chr13:36827622-36829623_118 | + | chr13:36828126-36828151 | UUGUCAUAGUGACCUUGAAAACCAC | 1744 |
| 5994_3::chr13:36827622-36829623_121 | + | chr13:36828140-36828165 | UUGAAAACCACUGGCUUUUAGUGAG | 1745 |
| 5994_3::chr13:36827622-36829623_125 | + | chr13:36828145-36828170 | AACCACUGGCUUUUAGUGAGUGGCC | 1746 |
| 5994_3::chr13:36827622-36829623_130 | + | chr13:36828171-36828196 | GGAAUGCUAAAUGUUCUGCAGUGUC | 1747 |
| 5994_3::chr13:36827622-36829623_132 | + | chr13:36828172-36828197 | GAAUGCUAAAUGUUCUGCAGUGUCA | 1748 |
| 5994_3::chr13:36827622-36829623_133 | + | chr13:36828173-36828198 | AAUGCUAAAUGUUCUGCAGUGUCAG | 1749 |
| 5994_3::chr13:36827622-36829623_138 | + | chr13:36828238-36828263 | CAAUAACACUCCUAAGAAAUGUUGA | 1750 |
| 5994_3::chr13:36827622-36829623_139 | + | chr13:36828249-36828274 | CUAAGAAAUGUUGAUGGCUAUUUUG | 1751 |
| 5994_3::chr13:36827622-36829623_142 | + | chr13:36828266-36828291 | CUAUUUUGUGGUGCUAACAUGUAGU | 1752 |
| 5994_3::chr13:36827622-36829623_144 | + | chr13:36828267-36828292 | UAUUUUGUGGUGCUAACAUGUAGUU | 1753 |
| 5994_3::chr13:36827622-36829623_145 | + | chr13:36828268-36828293 | AUUUUGUGGUGCUAACAUGUAGUUG | 1754 |
| 5994_3::chr13:36827622-36829623_150 | + | chr13:36828281-36828306 | AACAUGUAGUUGGGGCACCUAUAAU | 1755 |
| 5994_3::chr13:36827622-36829623_151 | + | chr13:36828282-36828307 | ACAUGUAGUUGGGGCACCUAUAAUU | 1756 |
| 5994_3::chr13:36827622-36829623_160 | + | chr13:36828331-36828356 | GCAGUUAAGACUGAAGCUGUCAAAG | 1757 |
| 5994_3::chr13:36827622-36829623_166 | + | chr13:36828357-36828382 | GGUAAGCACAUUUUAUAUAGACGUA | 1758 |
| 5994_3::chr13:36827622-36829623_172 | + | chr13:36828391-36828416 | AUUAUUGUUUAAUAUCUGUGAAUUU | 1759 |
| 5994_3::chr13:36827622-36829623_178 | + | chr13:36828412-36828437 | AUUUAGGAUGUGCAUCUCUUUUCAG | 1760 |
| 5994_3::chr13:36827622-36829623_182 | + | chr13:36828433-36828458 | UCAGAGGUGUGUUAGUAAAACCUGA | 1761 |
| 5994_3::chr13:36827622-36829623_189 | + | chr13:36828451-36828476 | AACCUGACGGAUUAACUAAGCACAC | 1762 |
| 5994_3::chr13:36827622-36829623_190 | + | chr13:36828452-36828477 | ACCUGACGGAUUAACUAAGCACACU | 1763 |
| 5994_3::chr13:36827622-36829623_192 | + | chr13:36828471-36828496 | CACACUGGGAUGUGUCUCCUACAGU | 1764 |
| 5994_3::chr13:36827622-36829623_224 | + | chr13:36828638-36828663 | AAAAUGAAAAAGAUCCUUUUCAAAA | 1765 |
| 5994_3::chr13:36827622-36829623_243 | + | chr13:36828748-36828773 | UAAUGUUCAAAAAUGAUAAGUAAUC | 1766 |
| 5994_3::chr13:36827622-36829623_246 | + | chr13:36828776-36828801 | AUACCUUUUUCUUAUACUUUCUCCU | 1767 |
| 5994_3::chr13:36827622-36829623_255 | + | chr13:36828799-36828824 | CUAGGAAAACUUUAAAACUUUAAAA | 1768 |
| 5994_3::chr13:36827622-36829623_260 | + | chr13:36828815-36828840 | ACUUUAAAAAGGCAAACCUACCAAU | 1769 |
| 5994_3::chr13:36827622-36829623_267 | + | chr13:36828856-36828881 | AUGUCAAGAGAGUAUAUCCAAUAUU | 1770 |
| 5994_3::chr13:36827622-36829623_280 | + | chr13:36828944-36828969 | CUAUAUAUAAAGUUCGACUUAAUCA | 1771 |
| 5994_3::chr13:36827622-36829623_286 | + | chr13:36828966-36828991 | UCAUGGCUGUUCUAAGAAGUACUUA | 1772 |
| 5994_3::chr13:36827622-36829623_325 | + | chr13:36829129-36829154 | UUUAGUUUAUUCUUACUAGAUGCAG | 1773 |
| 5994_3::chr13:36827622-36829623_345 | + | chr13:36829218-36829243 | UUUUUGAAGCUUAAGUUACCCUUUA | 1774 |
| 5994_3::chr13:36827622-36829623_349 | + | chr13:36829221-36829246 | UUGAAGCUUAAGUUACCCUUUAUGG | 1775 |
| 5994_3::chr13:36827622-36829623_361 | + | chr13:36829250-36829275 | AAACAUUAGCUUAUGCUUCUUUAGA | 1776 |
| 5994_3::chr13:36827622-36829623_364 | + | chr13:36829258-36829283 | GCUUAUGCUUCUUUAGAUGGAAUAA | 1777 |
| 5994_3::chr13:36827622-36829623_367 | + | chr13:36829259-36829284 | CUUAUGCUUCUUUAGAUGGAAUAAU | 1778 |
| 5994_3::chr13:36827622-36829623_370 | + | chr13:36829264-36829289 | GCUUCUUUAGAUGGAAUAAUGGGAA | 1779 |
| 5994_3::chr13:36827622-36829623_373 | + | chr13:36829267-36829292 | UCUUUAGAUGGAAUAAUGGGAAAGG | 1780 |
| 5994_3::chr13:36827622-36829623_375 | + | chr13:36829268-36829293 | CUUUAGAUGGAAUAAUGGGAAAGGA | 1781 |
| 5994_3::chr13:36827622-36829623_382 | + | chr13:36829274-36829299 | AUGGAAUAAUGGGAAAGGAGGGAAA | 1782 |
| 5994_3::chr13:36827622-36829623_383 | + | chr13:36829275-36829300 | UGGAAUAAUGGGAAAGGAGGGAAAU | 1783 |
| 5994_3::chr13:36827622-36829623_386 | + | chr13:36829281-36829306 | AAUGGGAAAGGAGGGAAAUGGGAAA | 1784 |
| 5994_3::chr13:36827622-36829623_389 | + | chr13:36829285-36829310 | GGAAAGGAGGGAAAUGGGAAAUGGA | 1785 |
| 5994_3::chr13:36827622-36829623_392 | + | chr13:36829291-36829316 | GAGGGAAAUGGGAAAUGGAUGGAAA | 1786 |
| 5994_3::chr13:36827622-36829623_393 | + | chr13:36829292-36829317 | AGGGAAAUGGGAAAUGGAUGGAAAU | 1787 |
| 5994_3::chr13:36827622-36829623_396 | + | chr13:36829297-36829322 | AAUGGGAAAUGGAUGGAAAUGGGAA | 1788 |
| 5994_3::chr13:36827622-36829623_400 | + | chr13:36829300-36829325 | GGGAAAUGGAUGGAAAUGGGAAAGG | 1789 |
| 5994_3::chr13:36827622-36829623_401 | + | chr13:36829301-36829326 | GGAAAUGGAUGGAAAUGGGAAAGGA | 1790 |
| 5994_3::chr13:36827622-36829623_409 | + | chr13:36829335-36829360 | AUAGCCCAGUGAGAGCUGAAUGAAA | 1791 |
| 5994_3::chr13:36827622-36829623_410 | + | chr13:36829336-36829361 | UAGCCCAGUGAGAGCUGAAUGAAAA | 1792 |
| 5994_3::chr13:36827622-36829623_419 | + | chr13:36829391-36829416 | UGUGAUGAUGAGUAAUUGUCAGACG | 1793 |
| 5994_3::chr13:36827622-36829623_422 | + | chr13:36829392-36829417 | GUGAUGAUGAGUAAUUGUCAGACGU | 1794 |
| 5994_3::chr13:36827622-36829623_426 | + | chr13:36829408-36829433 | GUCAGACGUGGGAUAGAUAACUGAG | 1795 |
| 5994_3::chr13:36827622-36829623_431 | + | chr13:36829427-36829452 | ACUGAGAGGCUCAGAAUCUUUACCA | 1796 |
| 5994_3::chr13:36827622-36829623_433 | + | chr13:36829439-36829464 | AGAAUCUUUACCAAGGAUAUUUUUU | 1797 |
| 5994_3::chr13:36827622-36829623_434 | + | chr13:36829445-36829470 | UUUACCAAGGAUAUUUUUUAGGAUA | 1798 |
| 5994_3::chr13:36827622-36829623_444 | + | chr13:36829468-36829493 | UAAGGUAGCUGCCUGUUCAUGAAUU | 1799 |
| 5994_3::chr13:36827622-36829623_448 | + | chr13:36829482-36829507 | GUUCAUGAAUUUGGAUAAGAAUAGU | 1800 |
| 5994_3::chr13:36827622-36829623_466 | + | chr13:36829563-36829588 | UUAUAAAAUGAUCAAUAAAGCAAUA | 1801 |
| 5994_3::chr13:36827622-36829623_469 | + | chr13:36829573-36829598 | AUCAAUAAAGCAAUAAGGUUUAUUU | 1802 |
| 5994_3::chr13:36827622-36829623_470 | + | chr13:36829574-36829599 | UCAAUAAAGCAAUAAGGUUUAUUUU | 1803 |
| 5994_3::chr13:36827622-36829623_485 | − | chr13:36827660-36827685 | GUUUCUGUAAAAAUUGCACUACUUC | 1804 |
| 5994_3::chr13:36827622-36829623_497 | − | chr13:36827738-36827763 | GUAAGUUCCCUCACAUUGAUGUUCC | 1805 |
| 5994_3::chr13:36827622-36829623_502 | − | chr13:36827765-36827790 | AGAUAAAAAACCAUGUAGAUGUUCU | 1806 |
| 5994_3::chr13:36827622-36829623_508 | − | chr13:36827821-36827846 | CAUAGAUUAUUACCCCAUUUAUGUC | 1807 |
| 5994_3::chr13:36827622-36829623_514 | − | chr13:36827849-36827874 | UUACAGGAAAAUGUUUAUGUUCUAC | 1808 |
| 5994_3::chr13:36827622-36829623_515 | − | chr13:36827870-36827895 | UCCCCAAAUGCACACAUACAUUUAC | 1809 |
| 5994_3::chr13:36827622-36829623_529 | − | chr13:36827969-36827994 | AAAAACAUUAUAAUUAAAUGUUAUU | 1810 |
| 5994_3::chr13:36827622-36829623_540 | − | chr13:36828010-36828035 | UUACCUUCAGUAACAAUGACUGAAG | 1811 |
| 5994_3::chr13:36827622-36829623 561 | − | chr13:36828141-36828166 | UGAGUGAUUUUCGGUCACCUUUUCA | 1812 |
| 5994_3::chr13:36827622-36829623_563 | − | chr13:36828150-36828175 | AAGGACCGGUGAGUGAUUUUCGGUC | 1813 |
| 5994_3::chr13:36827622-36829623_566 | − | chr13:36828171-36828196 | CUGUGACGUCUUGUAAAUCGUAAGG | 1814 |
| 5994_3::chr13:36827622-36829623_571 | − | chr13:36828208-36828233 | CGCCCACUCUGUUAGAAAUCAUACA | 1815 |
| 5994_3::chr13:36827622-36829623_572 | − | chr13:36828209-36828234 | ACGCCCACUCUGUUAGAAAUCAUAC | 1816 |
| 5994_3::chr13:36827622-36829623_581 | − | chr13:36828231-36828256 | UUCUUAGGAGUGUAUAACCGUGACG | 1817 |
| 5994_3::chr13:36827622-36829623_582 | − | chr13:36828232-36828257 | UUUCUUAGGAGUGUAUAACCGUGAC | 1818 |
| 5994_3::chr13:36827622-36829623_584 | − | chr13:36828240-36828265 | CAUCAACAUUUCUUAGGAGUGUAUA | 1819 |
| 5994_3::chr13:36827622-36829623_586 | − | chr13:36828251-36828276 | CACAAAAUAGCCAUCAACAUUUCUU | 1820 |
| 5994_3::chr13:36827622-36829623_592 | − | chr13:36828301-36828326 | AAGGUUAUUAAGAGAACCCAAUUAU | 1821 |
| 5994_3::chr13:36827622-36829623_598 | − | chr13:36828325-36828350 | CAGCUUCAGUCUUAACUGCAAAGAA | 1822 |
| 5994_3::chr13:36827622-36829623_615 | − | chr13:36828456-36828481 | UCCCAGUGUGCUUAGUUAAUCCGUC | 1823 |
| 5994_3::chr13:36827622-36829623_616 | − | chr13:36828491-36828516 | AACAUCAAAGAGAGAAGCCAACUGU | 1824 |
| 5994_3::chr13:36827622-36829623_625 | − | chr13:36828520-36828545 | UCUGCUUUAAGAGAUCAGCACUAAC | 1825 |
| 5994_3::chr13:36827622-36829623_636 | − | chr13:36828589-36828614 | AAAAUAAUUUUGUCUUGGCAUUGGU | 1826 |
| 5994_3::chr13:36827622-36829623_637 | − | chr13:36828590-36828615 | AAAAAUAAUUUUGUCUUGGCAUUGG | 1827 |
| 5994_3::chr13:36827622-36829623 639 | − | chr13:36828593-36828618 | AAGAAAAAUAAUUUUGUCUUGGCAU | 1828 |
| 5994_3::chr13:36827622-36829623_640 | − | chr13:36828599-36828624 | AAGUAUAAGAAAAAUAAUUUUGUCU | 1829 |
| 5994_3::chr13:36827622-36829623_658 | − | chr13:36828655-36828680 | UAUUUUCAGGAUCACCUUUUUGAAA | 1830 |
| 5994_3::chr13:36827622-36829623 665 | − | chr13:36828673-36828698 | AUACUCGAGUGUUAGUUUUAUUUUC | 1831 |
| 5994_3::chr13:36827622-36829623_669 | − | chr13:36828694-36828719 | AUUGCGAAAAACAAUGACAAAAUAC | 1832 |
| 5994_3::chr13:36827622-36829623_682 | − | chr13:36828745-36828770 | UACUUAUCAUUUUUGAACAUUACUU | 1833 |
| 5994_3::chr13:36827622-36829623_689 | − | chr13:36828782-36828807 | UUUCCUAGGAGAAAGUAUAAGAAAA | 1834 |
| 5994_3::chr13:36827622-36829623_700 | − | chr13:36828801-36828826 | CUUUUUAAAGUUUUAAAGUUUUCCU | 1835 |
| 5994_3::chr13:36827622-36829623_712 | − | chr13:36828834-36828859 | CAUUUAAUUUGUUAUUCCUAUUGGU | 1836 |
| 5994_3::chr13:36827622-36829623_714 | − | chr13:36828838-36828863 | UUGACAUUUAAUUUGUUAUUCCUAU | 1837 |
| 5994_3::chr13:36827622-36829623_718 | − | chr13:36828876-36828901 | GACACAUACAUUUAUAUCCUAAUAU | 1838 |
| 5994_3::chr13:36827622-36829623_756 | − | chr13:36829089-36829114 | AUCAGCUAACUCAAAGGUCAACAAC | 1839 |
| 5994_3::chr13:36827622-36829623_758 | − | chr13:36829100-36829125 | AGAAUAAAGAAAUCAGCUAACUCAA | 1840 |
| 5994_3::chr13:36827622-36829623_774 | − | chr13:36829239-36829264 | AUAAGCUAAUGUUUUCCACCAUAAA | 1841 |
| 5994_3::chr13:36827622-36829623_775 | − | chr13:36829240-36829265 | CAUAAGCUAAUGUUUUCCACCAUAA | 1842 |
| 5994_3::chr13:36827622-36829623_799 | − | chr13:36829342-36829367 | UCAGGGAUUUCAUUCAGCUCUCACU | 1843 |
| 5994_3::chr13:36827622-36829623_800 | − | chr13:36829343-36829368 | GUCAGGGAUUUCAUUCAGCUCUCAC | 1844 |
| 5994_3::chr13:36827622-36829623_813 | − | chr13:36829452-36829477 | GCUACCUUAUCCUAAAAAAUAUCCU | 1845 |
| 5994_3::chr13:36827622-36829623_817 | − | chr13:36829482-36829507 | ACUAUUCUUAUCCAAAUUCAUGAAC | 1846 |
| 5994_3::chr13:36827622-36829623_825 | − | chr13:36829544-36829569 | UUAUAAGGUAAAAAAAUGUCUAAUG | 1847 |
| 5994_3::chr13:36827622-36829623_833 | − | chr13:36829564-36829589 | UUAUUGCUUUAUUGAUCAUUUUAUA | 1848 |

TABLE 1c
gRNA targeting domains for CIITA, a molecule that regulates the expression of MHC II.

| | | Genomic | | |
|---|---|---|---|---|
| | | location (hg38) | | |
| | | of target | gRNA targeting | |
| CIITA ID | Strand | sequence | domain sequence | SEQ. ID NO: |
| C2. Exon I | | chr16:10877379-10877398 | UUCCCGGCCUUUUUACCUUG | 1849 |

[0476] ^{a}Portions of the gRNA targeting domain sequences shown in lower case letters in Tables 1a-c correspond to sequences that are optionally present, i.e., in some embodiments the gRNA targeting domain sequence may lack the sequence shown in lower case letters.

[0477] In preferred embodiments, a plurality of gRNA molecules targets a first sequence of a molecule that regulates the expression of MHC II, and a second sequence of a component of the T cell system, and optionally a third sequence of a molecule that regulates the expression of MHC I.

[0478] In an aspect, the disclosure further provides for compositions useful for directing gene editing systems, e.g., a CRISPR system, zinc finger nuclease system, TALEN system, or meganuclease system, to a target sequences of a first target, i.e., a molecule that regulates the expression of MHC II and a second target, i.e., a component of the T cell system, and optionally a third target, i.e., a molecule that regulates the expression of MHC I. In embodiments the gene editing systems may further comprise a template nucleic acid, for example, for insertion of heterologous nucleic acid sequence (e.g., sequence encoding a CAR, e.g., as described herein) at or near the target locus. In an aspect, the gene editing system is a CRISPR system comprising a plurality of gRNA molecules each comprising a targeting domain sequence, wherein the targeting domain sequences are complementary to a first target sequence of a molecule that regulates the expression of MHC II and a second target sequence of a component of the T cell system. In some embodiments, the gene editing system further comprises a gRNA molecule comprising a targeting domain sequence complementary to a third target sequence of a molecule that regulates the expression of MHC I (e.g. HLA-A, HLA-B, HLA-C, B2M, or NLRC5). In embodiments involving a CRISPR system, the gRNA molecule comprises a targeting domain sequence complementary to a target sequence adjacent to a PAM recognition sequence of the Cas molecule (e.g., Cas9 molecule) of the CRISPR system. Table 3 provides the genomic locations of the target molecule that regulates the expression of MHC II according to hg38. In an aspect, the gene editing system, e.g., CRISPR system, creates a break (e.g., single or double-strand break) at a sequence (e.g., between two nucleotides) between the start nucleotide and the end nucleotide of a first sequence of a molecule that regulates the expression of MHC II listed in Table 3, and a second sequence of a component of the T cell system, and optionally a third sequence of a molecule that regulates the expression of MHC I. In one preferred aspect, the gene editing system, e.g., CRISPR system, creates a break (e.g., single or double-strand break) at a sequence (e.g., between two nucleotides) between the start nucleotide and the end nucleotide of the a molecule that regulates the expression of MHC II, e.g., RFX5, RFXAP, and CIITA as shown in Table 3.

TABLE 37
Human RFX5, RFXAP, and CIITA start nucleotide
and end nucleotide genomic coordinates (according to hg38)

| Chromosome | Start Nucleotide | End Nucleotide | Description of region |
|---|---|---|---|
| chr1 | 151340619 | 151343198 | RFX5 |
| chr1 | 151343321 | 151343462 | RFX5 |
| chr1 | 151343660 | 151343902 | RFX5 |
| chr1 | 151344176 | 151344298 | RFX5 |
| chr1 | 151344396 | 151344556 | RFX5 |
| chr1 | 151344707 | 151344867 | RFX5 |
| chr1 | 151345085 | 151345208 | RFX5 |
| chr1 | 151345907 | 151345981 | RFX5 |
| chr1 | 151346184 | 151346353 | RFX5 |
| chr1 | 151346461 | 151346626 | RFX5 |
| chr1 | 151347190 | 151347313 | RFX5 |
| chr13 | 36819181 | 36819977 | RFXAP |
| chr13 | 36825407 | 36825555 | RFXAP |
| chr13 | 36827622 | 36829623 | RFXAP |
| chr16 | 10877379 | 10877398 | CIITA |

II. Methods for Designing gRNAs

[0479] Methods for designing gRNAs are described herein, including methods for selecting, designing and validating target sequences. Exemplary targeting domains are also provided herein. Targeting Domains discussed herein can be incorporated into the gRNAs described herein.

[0480] Methods for selection and validation of target sequences as well as off-target analyses are described, e.g., in. Mali el al., 2013 SCIENCE 339(6121): 823-826; Hsu et al., 2013 NAT BIOTECHNOL, 31 (9): 827-32; Fu et al., 2014 NAT BIOTECHNOL, doi: 10.1038/nbt.2808. PubMed PM ID: 24463574; Heigwer et al. 2014 NAT METHODS 11 (2): 122-3, doi: 10.1038/nmeth.2812. PubMed PMID: 24481216; Bae el al, 2014 BIOINFORMATICS PubMed PMID: 24463181; Xiao A el al, 2014 BIOINFORMATICS PubMed PMID: 24389662.

[0481] For example, a software tool can be used to optimize the choice of gRNA within a user's target sequence, e.g., to minimize total off-target activity across the genome. Off target activity may be other than cleavage. For each possible gRNA choice e.g., using S. pyogenes Cas9, the tool can identify all off-target sequences (e.g., preceding either NAG or NGG PAMs) across the genome that contain up to certain number (e.g., 1, 2, 3, 4, 5, 6, 7, 8, 9, or 10) of mismatched base-pairs. The cleavage efficiency at each off-target sequence can be predicted, e.g., using an experimentally-derived weighting scheme. Each possible gRNA is then ranked according to its total predicted off-target cleavage; the top-ranked gRNAs represent those that are likely to have the greatest on-target and the least off-target cleavage. Other functions, e.g., automated reagent design for CRISPR construction, primer design for the on-target Surveyor assay, and primer design for high-throughput detection and quantification of off-target cleavage via next-gen sequencing, can also be included in the tool. Candidate gRNA molecules can be evaluated by art-known methods or as described herein.

[0482] Although software algorithms may be used to generate an initial list of potential gRNA molecules, cutting efficiency and specificity will not necessarily reflect the predicted values, and gRNA molecules typically require screening in specific cell lines, e.g., primary human cell lines, e.g., primary human immune effector cells, e.g., primary human T cells, to determine, for example, cutting efficiency, indel formation, cutting specificity and change in desired phenotype. These properties may be assayed by the methods described herein.

### III. Cas Molecules

[0483] In some embodiments, the Cas molecule is a Class 1 Cas nuclease. In some embodiments, the Cas molecule is a Class 2 Cas nuclease. See, e.g., Makarova et al. (2015), Nat Rev Microbiol, 13(11): 722-36; Shmakov et al. (2015), Molecular Cell, 60:385-397. A Class 2 Cas molecule may be a single-protein endonuclease. In some embodiments, the Class 2 Cas molecule is from a Type II, V, or VI CRISPR/Cas system and may be a single-protein endonuclease. Non-limiting examples of Class 2 Cas molecules include Cas9, Cpf1, C2c1, C2c2, and C2c3 proteins. See, e.g., Yang et al. (2016), Cell, 167(7): 1814-28; Zetsche et al. (2015), Cell, 163: 1-13. In some embodiments, the Cas molecule is a Cpf1 molecule. Cpf1 may be homologous to Cas9 and contain a RuvC-like nuclease domain. See, e.g., Zetsche et al. (2015), the Cpf1 sequences of which are incorporated by reference in their entirety.

### Cas9 Molecules

[0484] In some embodiments, the Cas molecule is a Cas9 molecule or fragment or variant, e.g., catalytic or non-catalytic variant, thereof. Cas9 molecules of a variety of species can be used in the methods and compositions described herein. While the S. pyogenes Cas9 molecule are the subject of much of the disclosure herein, Cas9 molecules of, derived from, or based on the Cas9 proteins of other species listed herein can be used as well. In other words, other Cas9 molecules, e.g., S. thermophilus, Staphylococcus aureus and/or Neisseria meningitidis Cas9 molecules, may be used in the systems, methods and compositions described herein.

[0485] In some embodiments, the Cas9 molecule is a high-fidelity variant harboring alterations designed to reduce non-specific DNA contacts. See, e.g., Kleinstiver et al. (2016), Nature 529(7587): 490-95; Slaymaker et al. (2016), Science, 351(6268): 84-88; Tsai et al. (2014), Nat. Biotech. 32:569-577. In some embodiments, the high-fidelity Cas9 retains on-target activities comparable to wild-type Cas9. In some embodiments, the high-fidelity Cas9 reduces off-target activities by at least about 50%, 60%, 70%, 80%, 90%, 95%, or 99% as compared to wild-type Cas9, e.g., as measured by genome-wide break capture and targeted sequencing methods. In some embodiments, the high-fidelity Cas9 renders off-target activities undetectable, e.g., as measured by genome-wide break capture and targeted sequencing methods. In some embodiments, the high-fidelity Cas9 is Streptococcus pyogenes SpCas9-HF1 (Kleinstiver 2016) or Alt-R® S.p. HiFi Cas9 Nuclease 3NLS (IDT).

[0486] Additional Cas9 species include: Acidovorax avenae, Actinobacillus pleuropneumoniae, Actinobacillus succinogenes, Actinobacillus suis, Actinomyces sp., cycliphilus denitrificans, Aminomonas paucivorans, Bacillus cereus, Bacillus smithii, Bacillus thuringiensis, Bacteroides sp., Blastopirellula marina, Bradyrhiz obium sp., Brevibacillus latemsporus, Campylobacter coli, Campylobacter jejuni, Campylobacter lad, Candidatus puniceispirillum, Clostridiu cellulolyticum, Clostridium perfringens, Corynebacterium accolens, Corynebacterium diphtheria, Corynebacterium matruchotii, Dinoroseobacter sliibae, Eubacterium dolichum, gamma proteobacterium, Gluconacetobacler diazotrophicus, Haemophilus parainfluenzae, Haemophilus sputorum, Helicobacter canadensis, Helicobacter cinaedi, Helicobacter mustelae, Ilyobacler polytropus, Kingella kingae, Lactobacillus crispatus, Listeria ivanovii, Listeria monocytogenes, Listeriaceae bacterium, Methylocystis sp., Methylosinus trichosporium, Mobiluncus mulieris, Neisseria bacilliformis, Neisseria cinerea, Neisseria flavescens, Neisseria lactamica. Neisseria sp., Neisseria wadsworthii, Nitrosomonas sp., Parvibaculum lavamentivorans, Pasteurella multocida, Phascolarctobacterium succinatutens, Ralstonia syzygii, Rhodopseudomonas palustris, Rhodovulum sp., Simonsiella muelleri, Sphingomonas sp., Sporolactobacillus vineae, Staphylococcus lugdunensis, Streptococcus sp., Subdoligranulum sp., Tislrella mobilis, Treponema sp., or Verminephrobacter eiseniae.

[0487] A Cas9 molecule, as that term is used herein, refers to a molecule that can interact with a gRNA molecule (e.g., sequence of a domain of a tracr) and, in concert with the gRNA molecule, localize (e.g., target or home) to a site which comprises a target sequence and PAM sequence.

[0488] In an embodiment, the Cas9 molecule is capable of cleaving a target nucleic acid molecule, which may be referred to herein as an active Cas9 molecule. In an embodiment, an active Cas9 molecule, comprises one or more of the following activities: a nickase activity, i.e., the ability to cleave a single strand, e.g., the non-complementary strand or the complementary strand, of a nucleic acid molecule; a double stranded nuclease activity, i.e., the ability to cleave both strands of a double stranded nucleic acid and create a double stranded break, which in an embodiment is the presence of two nickase activities; an endonuclease activity; an exonuclease activity; and a helicase activity, i.e., the ability to unwind the helical structure of a double stranded nucleic acid.

[0489] In an embodiment, an enzymatically active Cas9 molecule cleaves both DNA strands and results in a double stranded break. In an embodiment, a Cas9 molecule cleaves only one strand, e.g., the strand to which the gRNA hybridizes to, or the strand complementary to the strand the gRNA hybridizes with. In an embodiment, an active Cas9 molecule comprises cleavage activity associated with an HNH-like domain. In an embodiment, an active Cas9 molecule comprises cleavage activity associated with an N-terminal RuvC-like domain. In an embodiment, an active Cas9 molecule comprises cleavage activity associated with an HNH-like domain and cleavage activity associated with an N-terminal RuvC-like domain. In an embodiment, an active Cas9 molecule comprises an active, or cleavage competent, HNH-like domain and an inactive, or cleavage incompetent, N-terminal RuvC-like domain. In an embodiment, an active Cas9 molecule comprises an inactive, or cleavage incompetent, HNH-like domain and an active, or cleavage competent, N-terminal RuvC-like domain.

[0490] In an embodiment, the ability of an active Cas9 molecule to interact with and cleave a target nucleic acid is PAM sequence dependent. A PAM sequence is a sequence in the target nucleic acid. In an embodiment, cleavage of the target nucleic acid occurs upstream from the PAM sequence. Active Cas9 molecules from different bacterial species can recognize different sequence motifs (e.g., PAM sequences). In an embodiment, an active Cas9 molecule of S. pyogenes recognizes the sequence motif NGG and directs cleavage of a target nucleic acid sequence 1 to 10, e.g., 3 to 5, base pairs upstream from that sequence. See, e.g., Mali el al., SCIENCE 2013; 339(6121): 823-826. In an embodiment, an active Cas9 molecule of S. thermophilus recognizes the sequence motif NGGNG and NNAGAAW (W=A or T) and directs cleavage of a core target nucleic acid sequence 1 to 10, e.g., 3 to 5, base pairs upstream from these sequences. See, e.g., Horvath et al., SCIENCE 2010; 327(5962): 167-170, and Deveau et al., J BACTERIOL 2008; 190(4): 1390-1400. In an embodiment, an active Cas9 molecule of S. mutans recognizes the sequence motif NGG or NAAR (R=A or G) and directs cleavage of a core target nucleic acid sequence 1 to 10, e.g., 3 to 5 base pairs, upstream from this sequence. See, e.g., Deveau et al., J BACTERIOL 2008; 190(4): 1390-1400.

[0491] In an embodiment, an active Cas9 molecule of S. aureus recognizes the sequence motif NNGRR (R=A or G) and directs cleavage of a target nucleic acid sequence 1 to 10, e.g., 3 to 5, base pairs upstream from that sequence. See, e.g., Ran F. et al., NATURE, vol. 520, 2015, pp. 186-191. In an embodiment, an active Cas9 molecule of N. meningitidis recognizes the sequence motif NNNNGATT and directs cleavage of a target nucleic acid sequence 1 to 10, e.g., 3 to 5, base pairs upstream from that sequence. See, e.g., Hou et al., PNAS 110(39): 15644-49 (2013). The ability of a Cas9 molecule to recognize a PAM sequence can be determined, e.g., using a transformation assay described in Jinek et al., SCIENCE 2012, 337:816.

[0492] Some Cas9 molecules have the ability to interact with a gRNA molecule, and in conjunction with the gRNA molecule bind to (e.g., target or localize to) a core target domain, but are incapable of cleaving the target nucleic acid, or incapable of cleaving at efficient rates. Cas9 molecules having no, or no substantial, cleavage activity may be referred to herein as an inactive Cas9 (an enzymatically inactive Cas9), a dead Cas9, or a dCas9 molecule. See, e.g., Gilbert et al. (2013), Cell, 154(2): 442-51. For example, an inactive Cas9 molecule can lack cleavage activity or have substantially less, e.g., less than 20, 10, 5, 1 or 0.1% of the cleavage activity of a reference Cas9 molecule, as measured by an assay described herein.

[0493] Other Cas molecules, e.g., Cpf1, may also have the ability to interact with a gRNA molecule, and in conjunction with the gRNA molecule bind to (e.g., target or localize to) a core target domain, but may be incapable of cleaving the target nucleic acid, or incapable of cleaving at efficient rates. See, e.g., WO2016/205711A1, incorporated herein by reference. Cpf1 molecules having no, or no substantial, cleavage activity may be referred to herein as an inactive Cpf1 (an enzymatically inactive Cpf1), a dead Cpf1, a dCpf1, a DNase-dead Cpf1, or a ddCpf1 molecule. See, e.g., Zhang et al. (2017), Cell Discov. 3:17018. For example, a ddCpf1 molecule can lack cleavage activity, DNase activity, or have substantially less, e.g., less than 20, 10, 5, 1 or 0.1% of the cleavage activity of a reference Cpf1 molecule, as measured by an assay described herein.

[0494] Exemplary naturally occurring Cas9 molecules that may be used with the methods provided herein are described in Chylinski et al., RNA Biology 2013; 10:5, 727-737. Such Cas9 molecules include Cas9 molecules of a cluster 1 bacterial family, cluster 2 bacterial family, cluster 3 bacterial family, cluster 4 bacterial family, cluster 5 bacterial family, cluster 6 bacterial family, a cluster 7 bacterial family, a cluster 8 bacterial family, a cluster 9 bacterial family, a cluster 10 bacterial family, a cluster 11 bacterial family, a cluster 12 bacterial family, a cluster 13 bacterial family, a cluster 14 bacterial family, a cluster 1 bacterial family, a cluster 16 bacterial family, a cluster 17 bacterial family, a cluster 18 bacterial family, a cluster 19 bacterial family, a cluster 20 bacterial family, a cluster 21 bacterial family, a cluster 22 bacterial family, a cluster 23 bacterial family, a cluster 24 bacterial family, a cluster 25 bacterial family, a cluster 26 bacterial family, a cluster 27 bacterial family, a cluster 28 bacterial family, a cluster 29 bacterial family, a cluster 30 bacterial family, a cluster 31 bacterial family, a cluster 32 bacterial family, a cluster 33 bacterial family, a cluster 34 bacterial family, a cluster 35 bacterial family, a cluster 36 bacterial family, a cluster 37 bacterial family, a cluster 38 bacterial family, a cluster 39 bacterial family, a cluster 40 bacterial family, a cluster 41 bacterial family, a cluster 42 bacterial family, a cluster 43 bacterial family, a cluster 44 bacterial family, a cluster 45 bacterial family, a cluster 46 bacterial family, a cluster 47 bacterial family, a cluster 48 bacterial family, a cluster 49 bacterial family, a cluster 50 bacterial family, a cluster 51 bacterial family, a cluster 52 bacterial family, a cluster 53 bacterial family, a cluster 54 bacterial family, a cluster 55 bacterial family, a cluster 56 bacterial family, a cluster 57 bacterial family, a cluster 58 bacterial family, a cluster 59 bacterial family, a cluster 60 bacterial family, a cluster 61 bacterial family, a cluster 62 bacterial family, a cluster 63 bacterial family, a cluster 64 bacterial family, a cluster 65 bacterial family, a cluster 66 bacterial family, a cluster 67 bacterial family, a cluster 68 bacterial family, a cluster 69 bacterial family, a cluster 70 bacterial family, a cluster 71 bacterial family, a cluster 72 bacterial family, a cluster 73 bacterial family, a cluster 74 bacterial family, a cluster 75 bacterial family, a cluster 76 bacterial family, a cluster 77 bacterial family, or a cluster 78 bacterial family.

[0495] Exemplary naturally occurring Cas9 molecules include a Cas9 molecule of a cluster 1 bacterial family. Examples include a Cas9 molecule of: S. pyogenes (e.g., strain SF370, MGAS 10270, MGAS 10750, MGAS2096, MGAS315, MGAS5005, MGAS6180, MGAS9429, NZ131 and SSI-1), S. thermophilus (e.g., strain LMD-9), S. pseudoporcinus (e.g., strain SPIN 20026), S. mutans (e.g., strain UA 159, NN2025), S. macacae (e.g., strain NCTC1 1558), S. gallolylicus (e.g., strain UCN34, ATCC BAA-2069), S. equines (e.g., strain ATCC 9812, MGCS 124), S. dysdalactiae (e.g., strain GGS 124), S. bovis (e.g., strain ATCC 700338), S. anginosus (e.g.; strain F0211), S. agalactia (e.g., strain NEM316, A909), Listeria monocytogenes (e.g., strain F6854), Listeria innocua (L. innocua, e.g., strain Clip 11262), Enterococcus italicus (e.g., strain DSM 15952), or Enterococcus faecium (e.g., strain 1,231,408). Additional exemplary Cas9 molecules are a Cas9 molecule of Neisseria meningitidis (Hou et al. PNAS Early Edition 2013, 1-6) and a S. aureus Cas9 molecule.

[0496] In an embodiment, a Cas9 molecule, e.g., an active Cas9 molecule or inactive Cas9 molecule, comprises an amino acid sequence: having 60%, 65%, 70%, 75%, 80%, 85%, 90%, 95% 96%, 97%, 98%, or 99% homology with: differs at no more than 1%, 2%, 5% 10%, 15%, 20%, 30%, or 40% of the amino acid residues when compared with; differs by at least 1, 2, 5, 10 or 20 amino acids but by no more than 100, 80, 70, 60, 50, 40 or 30 amino acids from; or is identical to: any Cas9 molecule sequence described herein or a naturally occurring Cas9 molecule sequence, e.g., a Cas9 molecule from a species listed herein or described in Chylinski et al., RNA Biology 2013, 10:5, or Hou et al. PNAS Early Edition 2013, 1-6.

[0497] In an embodiment, a Cas9 molecule comprises an amino acid sequence having 60%, 65%, 70%, 75%, 80%, 85%, 90%, 95%, 96%, 97%, 98% or 99% homology with; differs at no more than 1%, 2%, 5%, 10%, 15%, 20%, 30%, or 40% of the amino acid residues when compared with; differs by at least 1, 2, 5, 10 or 20 amino acids but by no more than 10, 80, 70, 60, 50, 40 or 30 amino acids from; or is identical to; S. pyogenes Cas9:

```
(SEQ ID NO: 90)
Met Asp Lys Lys Tyr Ser Ile Gly Leu Asp Ile Gly Thr Asn Ser Val
1 5 10 15
Gly Trp Ala Val Ile Thr Asp Glu Tyr Lys Val Pro Ser Lys Lys Phe
                20 25 30
Lys Val Leu Gly Asn Thr Asp Arg His Ser Ile Lys Lys Asn Leu Ile
                35 40 45
Gly Ala Leu Leu Phe Asp Ser Gly Glu Thr Ala Glu Ala Thr Arg Leu
        50 55 60
Lys Arg Thr Ala Arg Arg Arg Tyr Thr Arg Arg Lys Asn Arg Ile Cys
65 70 75 80
Tyr Leu Gln Glu Ile Phe Ser Asn Glu Met Ala Lys Val Asp Asp Ser
                                85 90 95
Phe Phe His Arg Leu Glu Glu Ser Phe Leu Val Glu Glu Asp Lys Lys
                        100 105 110
His Glu Arg His Pro Ile Phe Gly Asn Ile Val Asp Glu Val Ala Tyr
                115 120 125
His Glu Lys Tyr Pro Thr Ile Tyr His Leu Arg Lys Lys Leu Val Asp
        130 135 140
Ser Thr Asp Lys Ala Asp Leu Arg Leu Ile Tyr Leu Ala Leu Ala His
145 150 155 160
Met Ile Lys Phe Arg Gly His Phe Leu Ile Glu Gly Asp Leu Asn Pro
                                165 170 175
Asp Asn Ser Asp Val Asp Lys Leu Phe Ile Gln Leu Val Gln Thr Tyr
                        180 185 190
Asn Gln Leu Phe Glu Glu Asn Pro Ile Asn Ala Ser Gly Val Asp Ala
                195 200 205
Lys Ala Ile Leu Ser Ala Arg Leu Ser Lys Ser Arg Arg Leu Glu Asn
        210 215 220
Leu Ile Ala Gln Leu Pro Gly Glu Lys Lys Asn Gly Leu Phe Gly Asn
225 230 235 240
Leu Ile Ala Leu Ser Leu Gly Leu Thr Pro Asn Phe Lys Ser Asn Phe
                                245 250 255
Asp Leu Ala Glu Asp Ala Lys Leu Gln Leu Ser Lys Asp Thr Tyr Asp
                        260 265 270
Asp Asp Leu Asp Asn Leu Leu Ala Gln Ile Gly Asp Gln Tyr Ala Asp
                275 280 285
Leu Phe Leu Ala Ala Lys Asn Leu Ser Asp Ala Ile Leu Leu Ser Asp
        290 295 300
Ile Leu Arg Val Asn Thr Glu Ile Thr Lys Ala Pro Leu Ser Ala Ser
305 310 315 320
Met Ile Lys Arg Tyr Asp Glu His His Gln Asp Leu Thr Leu Leu Lys
                                325 330 335
Ala Leu Val Arg Gln Gln Leu Pro Glu Lys Tyr Lys Glu Ile Phe Phe
                        340 345 350
Asp Gln Ser Lys Asn Gly Tyr Ala Gly Tyr Ile Asp Gly Gly Ala Ser
                355 360 365
Gln Glu Glu Phe Tyr Lys Phe Ile Lys Pro Ile Leu Glu Lys Met Asp
        370 375 380
Gly Thr Glu Glu Leu Leu Val Lys Leu Asn Arg Glu Asp Leu Leu Arg
385 390 395 400
Lys Gln Arg Thr Phe Asp Asn Gly Ser Ile Pro His Gln Ile His Leu
                                405 410 415
Gly Glu Leu His Ala Ile Leu Arg Arg Gln Glu Asp Phe Tyr Pro Phe
                        420 425 430
Leu Lys Asp Asn Arg Glu Lys Ile Glu Lys Ile Leu Thr Phe Arg Ile
                435 440 445
Pro Tyr Tyr Val Gly Pro Leu Ala Arg Gly Asn Ser Arg Phe Ala Trp
        450 455 460
Met Thr Arg Lys Ser Glu Glu Thr Ile Thr Pro Trp Asn Phe Glu Glu
465 470 475 480
Val Val Asp Lys Gly Ala Ser Ala Gln Ser Phe Ile Glu Arg Met Thr
                                485 490 495
Asn Phe Asp Lys Asn Leu Pro Asn Glu Lys Val Leu Pro Lys His Ser
                        500 505 510
Leu Leu Tyr Glu Tyr Phe Thr Val Tyr Asn Glu Leu Thr Lys Val Lys
                515 520 525
Tyr Val Thr Glu Gly Met Arg Lys Pro Ala Phe Leu Ser Gly Glu Gln
        530 535 540
Lys Lys Ala Ile Val Asp Leu Leu Phe Lys Thr Asn Arg Lys Val Thr
545 550 555 560
Val Lys Gln Leu Lys Glu Asp Tyr Phe Lys Lys Ile Glu Cys Phe Asp
                                565 570 575
Ser Val Glu Ile Ser Gly Val Glu Asp Aag Phe Asn Ala Ser Leu Gly
                        580 585 590
Thr Tyr His Asp Leu Leu Lys Ile Ile Lys Asp Lys Asp Phe Leu Asp
                595 600 605
Asn Glu Glu Asn Glu Asp Ile Leu Glu Asp Ile Val Leu Thr Leu Thr
        610 615 620
Leu Phe Glu Asp Arg Glu Met Ile Glu Glu Arg Leu Lys Thr Tyr Ala
625 630 635 640
His Leu Phe Asp Asp Lys Val Met Lys Gln Leu Lys Arg Arg Arg Tyr
                        645 650 655
Thr Gly Trp Gly Arg Leu Ser Arg Lys Leu Ile Asn Gly Ile Arg Asp
                        660 665 670
Lys Gln Ser Gly Lys Thr Ile Leu Asp Phe Leu Lys Ser Asp Gly Phe
                675 680 685
Ala Asn Arg Asn Phe Met Gln Leu Ile His Asp Asp Ser Leu Thr Phe
        690 695 700
Lys Glu Asp Ile Gln Lys Ala Gln Val Ser Gly Gln Gly Asp Ser Leu
705 710 715 720
His Glu His Ile Ala Asn Leu Ala Gly Ser Pro Ala Ile Lys Lys Gly
                                725 730 735
Ile Leu Gln Thr Val Lys Val Val Asp Gln Leu Val Lys Val Met Gly
                        740 745 750
Arg His Lys Pro Glu Asn Ile Val Ile Glu Met Ala Arg Glu Asn Gln
                755 760 765
Thr Thr Gln Lys Gly Gln Lys Asn Ser Arg Glu Arg Met Lys Arg Ile
        770 775 780
Glu Glu Gly Ile Lys Glu Leu Gly Ser Gln Ile Leu Lys Glu His Pro
785 790 795 800
Val Glu Asn Thr Gln Leu Gln Asn Glu Lys Leu Tyr Leu Tyr Tyr Leu
                                805 810 815
Gln Asn Gly Arg Asp Met Tyr Val Asp Gln Gln Leu Asp Ile Asn Arg
                        820 825 830
Leu Ser Asp Tyr Asp Val Asp His Ile Val Pro Gln Ser Phe Leu Lys
                835 840 845
Asp Asp Ser Ile Asp Asn Lys Val Leu Thr Arg Ser Asp Lys Asn Arg
        850 855 860
Gly Lys Ser Asp Asn Val Pro Ser Glu Glu Val Val Lys Lys Met Lys
865 870 875 880
Asn Tyr Trp Arg Gln Leu Leu Asn Ala Lys Leu Ile Thr Gln Arg Lys
                                885 890 895
Phe Asp Asn Leu Thr Lys Ala Glu Arg Gly Gly Leu Ser Glu Leu Asp
                        900 905 910
Lys Ala Gly Phe Ile Lys Arg Gln Leu Val Glu Thr Arg Gln Ile Thr
                915 920 925
Lys His Val Ala Gln Ile Leu Asp Ser Arg Met Asn Thr Lys Tyr Asp
        930 935 940
Glu Asn Asp Lys Leu Ile Arg Glu Val Lys Val Ile Thr Leu Lys Ser
945 950 955 960
Lys Leu Val Ser Asp Phe Arg Lys Asp Phe Gln Phe Tyr Lys Val Arg
                                965 970 975
Glu Ile Asn Asn Tyr His His Ala His Asp Ala Tyr Leu Asn Ala Val
                        980 985 990
Val Gly Thr Ala Leu Ile Lys Lys Tyr Pro Lys Leu Glu Ser Glu Phe
                995 1000 1005
Val Tyr Gly Asp Tyr Lys Val Tyr Asp Val Arg Lys Met Ile Ala Lys
        1010 1015 1020
Ser Glu Gln Glu Ile Gly Lys Ala Thr Ala Lys Tyr Phe Phe Tyr Ser
1025 1030 1035 1040
Asn Ile Met Asn Phe Phe Lys Thr Glu Ile Thr Leu Ala Asn Gly Glu
                                1045 1050 1055
Ile Arg Lys Arg Pro Leu Ile Glu Thr Asn Gly Glu Thr Gly Glu Ile
                        1060 1065 1070
Val Trp Asp Lys Gly Arg Asp Phe Ala Thr Val Arg Lys Val Leu Ser
                1075 1080 1085
Met Pro Gln Val Asn Ile Val Lys Lys Thr Glu Val Gln Thr Gly Gly
        1090 1095 1100
Phe Ser Lys Glu Ser Ile Leu Pro Lys Arg Asn Ser Asp Lys Leu Ile
1105 1110 1115 1120
Ala Arg Lys Lys Asp Trp Asp Pro Lys Lys Tyr Gly Gly Phe Asp Ser
                                1125 1130 1135
Pro Thr Val Ala Tyr Ser Val Leu Val Val Ala Lys Val Glu Lys Gly
                        1140 1145 1150
Lys Ser Lys Lys Leu Lys Ser Val Lys Glu Leu Leu Gly Ile Thr Ile
                1155 1160 1165
Met Glu Arg Ser Ser Phe Glu Lys Asn Pro Ile Asp Phe Leu Glu Ala
        1170 1175 1180
Lys Gly Tyr Lys Glu Val Lys Lys Asp Leu Ile Ile Lys Leu Pro Lys
1185 1190 1195 1200
Tyr Ser Leu Phe Glu Leu Glu Asn Gly Arg Lys Arg Met Leu Ala Ser
                                1205 1210 1215
Ala Gly Glu Leu Gln Lys Gly Asn Glu Leu Ala Leu Pro Ser Lys Tyr
                        1220 1225 1230
Val Asn Phe Leu Tyr Leu Ala Ser His Tyr Glu Lys Leu Lys Gly Ser
                1235 1240 1245
Pro Glu Asp Asn Glu Gln Lys Gln Leu Phe Val Glu Gln His Lys His
        1250 1255 1260
Tyr Leu Asp Glu Ile Ile Glu Gln Ile Ser Glu Phe Ser Lys Arg Val
1265 1270 1275 1280
Ile Leu Ala Asp Ala Asn Leu Asp Lys Val Leu Ser Ala Tyr Asn Lys
                                1285 1290 1295
His Arg Asp Lys Pro Ile Arg Glu Gln Ala Glu Asn Ile Ile His Leu
                        1300 1305 1310
Phe Thr Leu Thr Asn Leu Gly Ala Pro Ala Ala Phe Lys Tyr Phe Asp
                1315 1320 1325
Thr Thr Ile Asp Arg Lys Arg Tyr The Ser The Lys Glu Val Leu Asp
        1330 1335 1340
Ala Thr Leu Ile His Gln Ser Ile Thr Gly Leu Tyr Glu Thr Arg Ile
1345 1350 1355 1360
Asp Leu Ser Gln Leu Gly Gly Asp
                                1365
```

[0498] In embodiments, the Cas9 molecule is a S. pyogenes Cas9 variant of SEQ ID NO: 90 that includes one or more mutations to positively charged amino acids (e.g., lysine, arginine or histidine) that introduce an uncharged or nonpolar amino acid, e.g., alanine, at said position. In embodiments, the mutation is to one or more positively charged amino acids in the nt-groove of Cas9. In embodiments, the Cas9 molecule is a S. pyogenes Cas9 variant of SEQ ID NO: 90 that includes a mutation at position 855 of SEQ ID NO: 90, for example a mutation to an uncharged amino acid, e.g., alanine, at position 855 of SEQ ID NO: 90. In embodiments, the Cas9 molecule has a mutation only at position 855 of SEQ ID NO: 90, relative to SEQ ID NO: 90, e.g., to an uncharged amino acid, e.g., alanine. In embodiments, the Cas9 molecule is a S. pyogenes Cas9 variant of SEQ ID NO: 90 that includes a mutation at position 810, a mutation at position 1003, and/or a mutation at position 1060 of SEQ ID NO: 90 for example a mutation to alanine at position 810, position 1003, and/or position 1060 of SEQ ID NO: 90. In embodiments, the Cas9 molecule has a mutation only at position 810, position 1003, and position 1060 of SEQ ID NO: 90, relative to SEQ ID NO: 90, e.g., where each mutation is to an uncharged amino acid, for example, alanine. In embodiments, the Cas9 molecule is a S. pyogenes Cas9 variant of SEQ ID NO: 90 that includes a mutation at position 848, a mutation at position 1003, and/or a mutation at position 1060 of SEQ ID NO: 90, for example a mutation to alanine at position 848, position 1003, and/or position 1060 of SEQ ID NO: 90. In embodiments, the Cas9 molecule has a mutation only at position 848, position 1003, and position 1060 of SEQ ID NO: 90, relative to SEQ ID NO: 90, e.g., where each mutation is to an uncharged amino acid, for example, alanine. In embodiments, the Cas9 molecule is a Cas9 molecule as described in Slaymaker et al., Science Express, available online Dec. 1, 2015 at Science DOI: 10.1126/science.aad5227.

[0499] In embodiments, the Cas9 molecule is a S. pyogenes Cas9 variant of SEQ ID NO: 90 that includes one or more mutations. In embodiments, the Cas9 variant comprises a mutation at position 80 of SEQ ID NO: 90, e.g., includes a leucine at position 80 of SEQ ID NO: 90 (i.e., comprises or consists of SEQ ID NO: 90 with a C80L mutation). In embodiments, the Cas9 variant comprises a mutation at position 574 of SEQ ID NO: 90, e.g., includes a glutamic acid at position 574 of SEQ ID NO: 90 (i.e., comprises or consists of SEQ ID NO: 90 with a C574E mutation). In embodiments, the Cas9 variant comprises a mutation at position 80 and a mutation at position 574 of SEQ ID NO: 90, e.g., includes a leucine at position 80 of SEQ ID NO: 90, and a glutamic acid at position 574 of SEQ ID NO: 90 (i.e., comprises or consists of SEQ ID NO: 90 with a C80L mutation and a C574E mutation). Without being bound by theory, it is believed that such mutations improve the solution properties of the Cas9 molecule.

[0500] In embodiments, the Cas9 molecule is a S. pyogenes Cas9 variant of SEQ ID NO: 90 that includes one or more mutations. In embodiments, the Cas9 variant comprises a mutation at position 147 of SEQ ID NO: 90, e.g., includes a tyrosine at position 147 of SEQ ID NO: 90 (i.e., comprises or consists of SEQ ID NO: 90 with a D147Y mutation). In embodiments, the Cas9 variant comprises a mutation at position 411 of SEQ ID NO: 90, e.g., includes a threonine at position 411 of SEQ ID NO: 90 (i.e., comprises or consists of SEQ ID NO: 90 with a P41IT mutation). In embodiments, the Cas9 variant comprises a mutation at position 147 and a mutation at position 411 of SEQ ID NO: 90, e.g., includes a tyrosine at position 147 of SEQ ID NO: 90, and a threonine at position 411 of SEQ ID NO: 90 (i.e., comprises or consists of SEQ ID NO: 90 with a D147Y mutation and a P411T mutation). Without being bound by theory, it is believed that such mutations improve the targeting efficiency of the Cas9 molecule, e.g., in yeast.

[0501] In embodiments, the Cas9 molecule is a S. pyogenes Cas9 variant of SEQ ID NO: 90 that includes one or more mutations. In embodiments, the Cas9 variant comprises a mutation at position 1135 of SEQ ID NO: 90, e.g., includes a glutamic acid at position 1135 of SEQ ID NO: 90 (i.e., comprises or consists of SEQ ID NO: 90 with a D1135E mutation). Without being bound by theory, it is believed that such mutations improve the selectivity of the Cas9 molecule for the NGG PAM sequence versus the NAG PAM sequence.

[0502] In embodiments, the Cas9 molecule is a S. pyogenes Cas9 variant of SEQ ID NO: 90 that includes one or more mutations that introduce an uncharged or nonpolar amino acid, e.g., alanine, at certain positions. In embodiments, the Cas9 molecule is a S. pyogenes Cas9 variant of SEQ ID NO: 90 that includes a mutation at position 497, a mutation at position 661, a mutation at position 695 and/or a mutation at position 926 of SEQ ID NO: 90, for example a mutation to alanine at position 497, position 661, position 695 and/or position 926 of SEQ ID NO: 90. In embodiments, the Cas9 molecule has a mutation only at position 497, position 661, position 695, and position 926 of SEQ ID NO: 90, relative to SEQ ID NO: 90, e.g., where each mutation is to an uncharged amino acid, for example, alanine. Without being bound by theory, it is believed that such mutations reduce the cutting by the Cas9 molecule at off-target sites

[0503] It will be understood that the mutations described herein to the Cas9 molecule may be combined, and may be combined with any of the fusions or other modifications described herein, and the Cas9 molecule may be tested in any of the assays described herein.

[0504] Various types of Cas molecules can be used herein. In some embodiments, Cas molecules of Type II Cas systems are used. In other embodiments, Cas molecules of other Cas systems are used. For example, Type I or Type III Cas molecules may be used. Exemplary Cas molecules (and Cas systems) are described, e.g., in Haft et al., PLoS COMPUTATIONAL BIOLOGY 2005, 1(6): e60 and Makarova et al., NATURE REVIEW MICROBIOLOGY 2011, 9:467-477, the contents of both references are incorporated herein by reference in their entirety.

[0505] In an embodiment, a Cas or Cas9 molecule used in the methods disclosed herein comprises one or more of the following activities: a nickase activity; a double stranded cleavage activity (e.g., an endonuclease and/or exonuclease activity); a helicase activity; or the ability, together with a gRNA molecule, to localize to a target nucleic acid.

### Altered Cas9 Molecules

[0506] Naturally occurring Cas9 molecules may possess a number of properties, including: nickase activity, nuclease activity (e.g., endonuclease and/or exonuclease activity); helicase activity; the ability to associate functionally with a gRNA molecule; and the ability to target (or localize to) a site on a nucleic acid (e.g., PAM recognition and specificity). In an embodiment, a Cas9 molecule used with the methods disclosed herein can include all or a subset of these properties. In typical embodiments, Cas9 molecules have the ability to interact with a gRNA molecule and, in concert with the gRNA molecule, localize to a site in a nucleic acid. Other activities, e.g., PAM specificity, cleavage activity, or helicase activity can vary more widely in Cas9 molecules.

[0507] Cas9 molecules with desired properties can be made in a number of ways, e.g., by alteration of a parental, e.g., naturally occurring Cas9 molecule to provide an altered Cas9 molecule having a desired property. For example, one or more mutations or differences relative to a parental Cas9 molecule can be introduced. Such mutations and differences may comprise: substitutions (e.g., conservative substitutions or substitutions of non-essential amino acids); insertions; or deletions. In an embodiment, a Cas9 molecule can comprises one or more mutations or differences, e.g., at least 1, 2, 3, 4, 5, 10, 15, 20, 30, 40 or 50 mutations but less than 200, 100, or 80 mutations relative to a reference Cas9 molecule while retaining or enhancing one or more activities of the reference Cas9 molecule.

[0508] In an embodiment, a mutation or mutations do not have a substantial effect on a Cas9 activity, e.g. a Cas9 activity described herein. In an embodiment, a mutation or mutations have a substantial effect on a Cas9 activity, e.g. a Cas9 activity described herein. In an embodiment, exemplary activities comprise one or more of PAM specificity, cleavage activity, and helicase activity. A mutation(s) can be present, e.g., in: one or more RuvC-like domain, e.g., an N-terminal RuvC-like domain; an HNH-like domain; a region outside the RuvC-like domains and the HNH-like domain. In some embodiments, a mutation(s) is present in an N-terminal RuvC-like domain. In some embodiments, a mutation(s) is present in an HNH-like domain. In some embodiments, mutations are present in both an N-terminal RuvC-like domain and an HNH-like domain.

[0509] Whether or not a particular sequence, e.g., a substitution, may affect one or more activity, such as targeting activity, cleavage activity, etc., can be evaluated or predicted by, e.g., evaluating whether the mutation is conservative or by the method described in Section III. In an embodiment, a “non-essential” amino acid residue, as used in the context of a Cas9 molecule, is a residue that can be altered from the wild-type sequence of a Cas9 molecule, e.g., a naturally occurring Cas9 molecule, e.g., an active Cas9 molecule, without abolishing or more preferably, without substantially altering a Cas9 activity (e.g., cleavage activity), whereas changing an “essential” amino acid residue results in a substantial loss of activity (e.g., cleavage activity).

Cas9 Molecules with Altered PAM Recognition or No PAM Recognition

[0510] Naturally occurring Cas9 molecules may recognize specific PAM sequences, for example the PAM recognition sequences described above for S. pyogenes, S. thermophilus, S. mutans, S. aureus and N. meningitidis.

[0511] In an embodiment, a Cas9 molecule has the same PAM specificities as a naturally occurring Cas9 molecule. In other embodiments, a Cas9 molecule has a PAM specificity not associated with a naturally occurring Cas9 molecule, or a PAM specificity not associated with the naturally occurring Cas9 molecule to which it has the closest sequence homology. For example, a naturally occurring Cas9 molecule can be altered, e.g., to alter PAM recognition, e.g., to alter the PAM sequence that the Cas9 molecule recognizes to decrease off target sites and/or improve specificity; or eliminate a PAM recognition requirement. In an embodiment, a Cas9 molecule can be altered, e.g., to increase length of PAM recognition sequence and/or improve Cas9 specificity to high level of identity to decrease off target sites and increase specificity. In an embodiment, the length of the PAM recognition sequence is at least 4, 5, 6, 7, 8, 9, 10 or 15 amino acids in length. Cas9 molecules that recognize different PAM sequences and/or have reduced off-target activity can be generated using directed evolution. Exemplary methods and systems that can be used for directed evolution of Cas9 molecules are described, e.g., in Esvelt el al., Nature 2011, 472(7344): 499-503. Candidate Cas9 molecules can be evaluated, e.g., by methods described herein.

### Non-Cleaving and Modified-Cleavage Cas9 Molecules

[0512] In an embodiment, a Cas9 molecule comprises a cleavage property that differs from a naturally occurring Cas9 molecule, e.g., that differs from the naturally occurring Cas9 molecule having the closest homology. For example, a Cas9 molecule can differ from naturally occurring Cas9 molecules, e.g., a Cas9 molecule of S. pyogenes, as follows: its ability to modulate, e.g., decreased or increased, cleavage of a double stranded break (endonuclease and/or exonuclease activity), e.g., as compared to a naturally occurring Cas9 molecule (e.g., a Cas9 molecule of S. pyogenes); its ability to modulate, e.g., decreased or increased, cleavage of a single strand of a nucleic acid, e.g., a non-complementary strand of a nucleic acid molecule or a complementary strand of a nucleic acid molecule (nickase activity), e.g., as compared to a naturally occurring Cas9 molecule (e.g., a Cas9 molecule of S. pyogenes); or the ability to cleave a nucleic acid molecule, e.g., a double stranded or single stranded nucleic acid molecule, can be eliminated.

### Modified Cleavage Active Cas9 Molecules

[0513] In an embodiment, an active Cas9 molecule comprises one or more of the following activities: cleavage activity associated with an N-terminal RuvC-like domain; cleavage activity associated with an HNH-like domain; cleavage activity associated with an HNH domain and cleavage activity associated with an N-terminal RuvC-like domain.

[0514] In an embodiment, the Cas9 molecule is a Cas9 nickase, e.g., cleaves only a single strand of DNA. In some embodiments, the Cas9 nickase comprises a RuvC-like domain that is capable of cleavage and a HNH-like domain that has reduced cleavage capability or is incapable of cleavage. In alternate embodiments, the Cas9 nickase comprises a HNH-like domain that is capable of cleavage and a RuvC-like domain that has reduced cleavage capability or is incapable of cleavage. In an embodiment, the Cas9 nickase includes a mutation at position 10 and/or a mutation at position 840 of SEQ ID NO: 90, e.g., comprises a D10A and/or H840A mutation to SEQ ID NO: 90.

### Non-Cleaving Inactive Cas9 Molecules

[0515] In an embodiment, the altered Cas9 molecule is an inactive Cas9 molecule which does not cleave a nucleic acid molecule (either double stranded or single stranded nucleic acid molecules) or cleaves a nucleic acid molecule with significantly less efficiency, e.g., less than 20, 10, 5, 1 or 0.1% of the cleavage activity of a reference Cas9 molecule, e.g., as measured by an assay described herein. The reference Cas9 molecule can by a naturally occurring unmodified Cas9 molecule, e.g., a naturally occurring Cas9 molecule such as a Cas9 molecule of S. pyogenes, S. thermophilus, S. aureus or N. meningitidis. In an embodiment, the reference Cas9 molecule is the naturally occurring Cas9 molecule having the closest sequence identity or homology. In an embodiment, the inactive Cas9 molecule lacks substantial cleavage activity associated with an N-terminal RuvC-like domain and cleavage activity associated with an HNH-like domain.

[0516] In an embodiment, the Cas9 molecule is dCas9. See, e.g., Tsai et al. (2014). Nat. Biotech. 32:569-577.

[0517] A catalytically inactive Cas9 molecule may be fused with a transcription repressor. An inactive Cas9 fusion protein complexes with a gRNA and localizes to a DNA sequence specified by gRNA's targeting domain, but, unlike an active Cas9, it will not cleave the target DNA. Fusion of an effector domain, such as a transcriptional repression domain, to an inactive Cas9 enables recruitment of the effector to any DNA site specified by the gRNA. Site specific targeting of a Cas9 fusion protein to a promoter region of a gene can block or affect polymerase binding to the promoter region, for example, a Cas9 fusion with a transcription factor (e.g., a transcription activator) and/or a transcriptional enhancer binding to the nucleic acid to increase or inhibit transcription activation. Alternatively, site specific targeting of a Cas9-fusion to a transcription repressor to a promoter region of a gene can be used to decrease transcription activation.

[0518] Transcription repressors or transcription repressor domains that may be fused to an inactive Cas9 molecule can include ruppel associated box (KRAB or SKD), the Mad mSIN3 interaction domain (SID) or the ERF repressor domain (ERD).

[0519] In another embodiment, an inactive Cas9 molecule may be fused with a protein that modifies chromatin. For example, an inactive Cas9 molecule may be fused to heterochromatin protein 1 (HP1), a histone lysine methyltransferase (e.g., SUV39H 1, SUV39H2, G9A, ESET/SETDB1, Pr-SET7/8, SUV4-20H1, RIZ1), a histone lysine demethylates (e.g., LSD1/BHC1 10, SpLsdl/Sw, 1/Safl 10, Su(var)3-3, JMJD2A/JHDM3A, JMJD2B, JMJD2C/GASC1, JMJD2D, Rph 1, JARID 1 A/RBP2, JARI DIB/PLU-1, JAR1D 1C/SMCX, JARID1 D/SMCY, Lid, Jhn2, Jmj2), a histone lysine deacetylases (e.g., HDAC1, HDAC2, HDAC3, HDAC8, Rpd3, Hos 1, Cir6, HDAC4, HDAC5, HDAC7, HDAC9, Hda1, Cir3, SIRT 1, SIRT2, Sir2, Hst 1, Hst2, Hst3, Hst4, HDAC 11) and a DNA methylases (DNMT1, DNMT2a/DMNT3b, MET1). An inactive Cas9-chromatin modifying molecule fusion protein can be used to alter chromatin status to reduce expression a target gene.

[0520] The heterologous sequence (e.g., the transcription repressor domain) may be fused to the N- or C-terminus of the inactive Cas9 protein. In an alternative embodiment, the heterologous sequence (e.g., the transcription repressor domain) may be fused to an internal portion (i.e., a portion other than the N-terminus or C-terminus) of the inactive Cas9 protein.

[0521] The ability of a Cas9 molecule/gRNA molecule complex to bind to and cleave a target nucleic acid can be evaluated, e.g., by the methods described herein in Section III. The activity of a Cas9 molecule, e.g., either an active Cas9 or an inactive Cas9, alone or in a complex with a gRNA molecule may also be evaluated by methods well-known in the art, including, gene expression assays and chromatin-based assays, e.g., chromatin immunoprecipitation (ChiP) and chromatin in vivo assay (CiA).

### Other Molecules

[0522] In embodiments, the Cas molecule, e.g., a Cas9 of S. pyogenes, may comprise one or more amino acid sequences that confer additional activity. Non-limiting examples include one or more of a nuclear localization signal or sequence, a mitochondrial localization signal, a chloroplast localization signal, a endoplasmic reticulum (ER) retention signal, a tag or a marker (e.g., a histidine tag or a fluorescent protein), or a larger polypeptide, e.g., an enzyme, a transcription factor, or a functional portion thereof (see, e.g., Maeder et al., 2013; Perez-Piniera et al., 2013; Gilbert et al., 2013; Guilinger et al., 2014).

[0523] In some aspects, the Cas9 molecule may comprise one or more nuclear localization sequences (NLSs), such as at least 1, 2, 3, 4, 5, 6, 7, 8, 9, 10, or more NLSs. In some embodiments, the Cas9 molecule comprises at least 1, 2, 3, 4, 5, 6, 7, 8, 9, 10, or more NLSs at or near the amino-terminus, at least 1, 2, 3, 4, 5, 6, 7, 8, 9, 10, or more NLSs at or near the carboxy-terminus, or a combination of these (e.g. one or more NLS at the amino-terminus and one or more NLS at the carboxy terminus). When more than one NLS is present, each may be selected independently of the others, such that a single NLS may be present in more than one copy and/or in combination with one or more other NLSs present in one or more copies. In some embodiments, an NLS is considered near the N- or C-terminus when the nearest amino acid of the NLS is within about 1, 2, 3, 4, 5, 10, 15, 20, 25, 30, 40, 50, or more amino acids along the polypeptide chain from the N- or C-terminus. Typically, an NLS consists of one or more short sequences of positively charged lysines or arginines exposed on the protein surface, but other types of NLS are known. Non-limiting examples of NLSs include an NLS sequence comprising or derived from: the NLS of the SV40 virus large T-antigen, having the amino acid sequence PKKKRKV (SEQ ID NO: 91); the NLS from nucleoplasmin (e.g. the nucleoplasmin bipartite NLS with the sequence KRPAATKKAGQAKKKK (SEQ ID NO: 92); the c-myc NLS having the amino acid sequence PAAKRVKLD (SEQ ID NO: 93) or RQRRNELKRSP (SEQ ID NO: 94); the hRNPA1 M9 NLS having the sequence NQSSNFGPMKGGNFGGRSSGPYGGGGQYFAKPRNQGGY (SEQ ID NO: 95); the sequence RMRIZFKNKGKDTAELRRRRVEVSVELRKAKKDEQILKRRNV (SEQ ID NO: 96) of the IBB domain from importin-alpha; the sequences VSRKRPRP (SEQ ID NO: 97) and PPKKARED (SEQ ID NO: 98) of the myoma T protein; the sequence PQPKKKPL (SEQ ID NO: 99) of human p53; the sequence SALIKKKKKMAP (SEQ ID NO: 100) of mouse c-ab1 IV; the sequences DRLRR (SEQ ID NO: 101) and PKQKKRK (SEQ ID NO: 102) of the influenza virus NS1; the sequence RKLKKKIKKL (SEQ ID NO: 103) of the Hepatitis virus delta antigen; the sequence REKKKFLKRR (SEQ ID NO: 104) of the mouse Mx1 protein; the sequence KRKGDEVDGVDEVAKKKSKK (SEQ ID NO: 105) of the human poly(ADP-ribose) polymerase; and the sequence RKCLQAGMNLEARKTKK (SEQ ID NO: 106) of the steroid hormone receptors (human) glucocorticoid. Other suitable NLS sequences are known in the art (e.g., Sorokin, Biochemistry (Moscow) (2007) 72:13, 1439-1457; Lange J Biol Chem. (2007) 282:8, 5101-5).

[0524] In some aspects, the Cas9 molecule may comprise one or more amino acid sequences that allow the Cas9 molecule to be specifically recognized, for example a tag. In one embodiment, the tag is a histidine tag, e.g., a histidine tag comprising at least 3, 4, 5, 6, 7, 8, 9, 10 or more histidine amino acids (SEQ ID NO: 107). In embodiments, the histidine tag is a His6 tag (six histidines) (SEQ ID NO: 108). In other embodiments, the histidine tag is a His8 tag (eight histidines) (SEQ ID NO: 109). In embodiments, the histidine tag may be separated from one or more other portions of the Cas9 molecule by a linker. In embodiments, the linker is GGS or a repeat of two or more GGS sequences, or a GGGS sequence (SEQ ID NO: 36) or a repeat of two or more GGGS sequences (SEQ ID NO: 36), or a GGGGS sequence (SEQ ID NO: 834) or a repeat of two or more GGGGS sequences (SEQ ID NO: 834). An example of such a fusion is the Cas9 molecule iProt106520.

[0525] In some aspects, the Cas9 molecule may comprise one or more amino acid sequences that are recognized by a protease (e.g., comprise a protease cleavage site). In embodiments, the cleavage site is the tobacco etch virus (TEV) cleavage site, e.g., comprises the sequence ENLYFQG (SEQ ID NO: 110). In some aspects the protease cleavage site, e.g., the TEV cleavage site is disposed between a tag, e.g., a His tag, e.g., a His6 (SEQ ID NO: 108) or His8 tag (SEQ ID NO: 109), and the remainder of the Cas9 molecule. Without being bound by theory it is believed that such introduction will allow for the use of the tag for, e.g., purification of the Cas9 molecule, and then subsequent cleavage so the tag does not interfere with the Cas9 molecule function.

[0526] In embodiments, the Cas9 molecule (e.g., a Cas9 molecule as described herein) comprises an N-terminal NLS, and a C-terminal NLS (e.g., comprises, from N- to C-terminal NLS-Cas9-NLS), e.g., wherein each NLS is an SV40 NLS (PKKKRKV (SEQ ID NO: 91)). In embodiments, the Cas9 molecule (e.g., a Cas9 molecule as described herein) comprises an N-terminal NLS, a C-terminal NLS, and a C-terminal His6 tag (SEQ ID NO: 108) (e.g., comprises, from N- to C-terminal NLS-Cas9-NLS-His tag), e.g., wherein each NLS is an SV40 NLS (PKKKRKV (SEQ ID NO: 91)). In embodiments, the Cas9 molecule (e.g., a Cas9 molecule as described herein) comprises an N-terminal His tag (e.g., His6 tag (SEQ ID NO: 108)), an N-terminal NLS, and a C-terminal NLS (e.g., comprises, from N- to C-terminal His tag-NLS-Cas9-NLS), e.g., wherein each NLS is an SV40 NLS (PKKKRKV (SEQ ID NO: 91)). In embodiments, the Cas9 molecule (e.g., a Cas9 molecule as described herein) comprises an N-terminal NLS and a C-terminal His tag (e.g., His6 tag (SEQ ID NO: 108)) (e.g., comprises from N- to C-terminal His tag-Cas9-NLS), e.g., wherein the NLS is an SV40 NLS (PKKKRKV (SEQ ID NO: 91)). In embodiments, the Cas9 molecule (e.g., a Cas9 molecule as described herein) comprises an N-terminal His tag (e.g., His6 tag (SEQ ID NO: 108)) and a C-terminal NLS (e.g., comprises from N- to C-terminal NLS-Cas9-His tag), e.g., wherein the NLS is an SV40 NLS (PKKKRKV (SEQ ID NO: 91)). In embodiments, the Cas9 molecule (e.g., a Cas9 molecule as described herein) comprises an N-terminal His tag (e.g., His8 tag (SEQ ID NO: 109)), an N-terminal cleavage domain (e.g., a tobacco etch virus (TEV) cleavage domain (e.g., comprises the sequence ENLYFQG (SEQ ID NO: 110))), an N-terminal NLS (e.g., an SV40 NLS; SEQ ID NO: 91), and a C-terminal NLS (e.g., an SV40 NLS; SEQ ID NO: 91) (e.g., comprises from N- to C-terminal His tag-TEV-NLS-Cas9-NLS). In any of the aforementioned embodiments the Cas9 has the sequence of SEQ ID NO: 90. Alternatively, in any of the aforementioned embodiments, the Cas9 has a sequence of a Cas9 variant of SEQ ID NO: 90, e.g., as described herein. In any of the aforementioned embodiments, the Cas9 molecule comprises a linker between the His tag and another portion of the molecule, e.g., a GGS linker. Amino acid sequences of exemplary Cas9 molecules described above are provided below. In some embodiments, a Cas9 molecule comprises an amino sequence having at least about 60%, 65%, 70%, 75%, 80%, 85%, 90%, 95%, 96%, 97%, 98%, or 99% homology with; differs at no more than 1%, 2%, 5%, 10%, 15%, 20%, 30%, or 40% of the amino acid residues when compared with; differs by at least 1, 2, 5, 10 or 20 amino acids but by no more than 100, 80, 70, 60, 50, 40 or 30 amino acids from; or is identical to to a Cas9 sequence provided herein, e.g., SEQ ID NO: 90, SEQ ID NO: 111, SEQ ID NO: 112, SEQ ID NO: 113, SEQ ID NO: 114, SEQ ID NO: 115, SEQ ID NO: 116, SEQ ID NO: 117, SEQ ID NO: 118, SEQ ID NO: 119, SEQ ID NO: 120, SEQ ID NO: 121, or SEQ ID NO: 123.

iProt105026 (also referred to as iProt106154, iProt106331,
iProt106545, and PID426303, depending on the preparation of
the protein) (SEQ ID NO: 111):
MARKKKRKVD KKYSIGLDIG TNSVGWAVIT DEYKVPSKKF KVLGNTDRHS IKKNLIGALL
FDSGETAEAT RLKRTARRRY TRRKNRICYL QEIFSNEMAK VDDSFFHRLE ESFLVEEDKK
HERHPIFGNI VDEVAYEEKY PTIYHLREKL VDSTDKADLR LIYLALAHMI KFRGHFLIEG
DLNPDNSDVD KIFIQLVQTY NQLFEENPIN ASGVDAKAIL SARLSKSRRL ENLIAQLPGE
KKNGLFGNLI ALSLGLTPNF KSNFDLAEDA KLQLSKDTYD DDLDNLLAQI GDQYADLFLA
AKNLSDAILL SDILRVNTEI TKAPLSASMI KRYDEHHQDL TLLRALVRQQ LPEKYKEIFF
DQSKNGYAGY IDGGASQEEF YKFIKPILEK MDGTEELLVK LNREDLLRNQ RTFDNGSIPH
QIHLGELHAI LRRQEDFYPF LKDNREKIEK ILTFRIPYYV GPLARGNSRF AWMTRKSEET
ITPWNFEEVV DKGASAQSFI ERMTNFDKNL PNEKVLPKHS LLYEYFTVYN ELTKVKYVTE
GMRKPAFLSG EQKKAIVDLL FKTNRKVTVK QLKEDYFKKI ECFDSVEISG VEDRFNASLG
TYHDLLKIIK DKDFLDNEEN EDILEDIVLT LTLFEDREMI EERLKTYAHL FDDKVMKQLK
RRRYTGWGRL SRKLINGIRD KQSGKTILDF LKSDGFANRN FMQLIHDDSL TEKEDIQKAQ
VSGQGDSLHE HIANLAGSPA IKKGILQTVK VVDELVKVMG RHKPENIVIE MARENQTTQK
GQKNSRERMK RIEEGIKELG SQILKEHPVE NTQLQNEKLY LYYLQNGRDM YVDQELDINR
LSDYDVDHIV PQSFLKDDSI DNKVLTRSDK NRGKSDNVPS EEVVKKMENY WRQLLNAKLI
TQRKEDNLTK AERGGLSELD KAGFIKRQLV ETRQITKHVA QILDSRMNTK YDENDKLIRE
VKVITLKSKL VSDFRKDFOF YKVREINNYH HAHDAYLNAV VGTALIKKYP KLESEFVYGD
YKVYDVRKMI AKSEQEIGKA TAKYFFYSNI MNFFKTEITL ANGEIRKRPL IETNGETGEI
VWDKGRDFAT VRKVLSMPQV NIVKKTEVQT GGFSKESILP KRNSDKLIAR KKDWDPKKYG
GFDSPTVAYS VLVVAKVEKG KSKKLKSVKE LLGITIMERS SFEKNPIDFL EAKGYKEVKK
DLIIKLPKYS LFELENGRKR MLASAGELOK GNELALPSKY VNFLYLASHY EKLKGSPEDN
EQKQLFVEQH KHYLDEIIEQ ISEFSKRVIL ADANLDKVLS AYNKHRDKPI REQAENIIHL
FTLTNLGAPA AFKYFDTTID RKRYTSTKEV LDATLIHQSI TGLYETRIDL SQLGGDSRAD
PKKKRKVHHH HHH
iProt106518 (SEQ ID NO: 112):
MAPKKKRKVD KKYSIGLDIG TNSVGWAVIT DEYKVPSKKF KVLGNTDRHS IKKNLIGALL
FDSGETAEAT RLKRTARRRY TRRKNRILYL QEIFSNEMAK VDDSFFHRLE ESFLVEEDKK
HERHPIFGNI VDEVAYHEKY PTIYHLRKKL VDSTDKADLR LIYLALAHMI KFRGHFLIEG
DLNPDNSDVD KLFIQLVQTY NQLFEENPIN ASGVDAKAIL SARLSKSRRL ENLIAQLPGE
KKNGLFGNLI ALSLGLTPNF KSNFDLAEDA KLQISKDTYD DDLDNLLAQI GDQYADLFLA
AKNLSDAILL SDILRVNTEI TKAPLSASMI KRYDEHHQDL TLLKALVRQQ LPEKYKEIFF
DQSKNGYAGY IDGGASQEEF YKFIKPILEK MDGTEELLVK LNREDLLRKQ RTFDNGSIPH
QIHLGELHAI LRRQEDFYPF LKDNREKIEK ILTFRIPYYV GPLARGNSRF AWMTRKSEET
ITPWNFEEVV DKGASAQSFI ERMTNFDKNL PNEKVIPKHS LLYEYFTVYN ELTKVKYVTE
GMRKPAFLSG EQKKAIVDLL FKTNRKVTVK QLKEDYFKKI EEFDSVEISG VEDRFNASLG
TYHDLLKIIK DKDFLDNEEN EDILEDIVLT LTLFEDREMI EERLKTYAHL FDDKVMKQLK
RRRYTGWGRL SRKLINGIRD KQSGKTILDF LKSDGFANRN FMQLIHDDSL TEKEDIQKAQ
VSGQGDSLHE HIANLAGSPA IKKGILQTVK VVDELVEVMG RHKPENIVIE MARENQTTQK
GQKNSPERMK RIEEGIKELG SQILKEHPVE NTQLQNEKLY LYYLQNGRDM YVDQELDINR
LSDYDVDHIV PQSFLKDDSI DNKVLTRSDK NRGKSDNVPS EEVVKKMKNY WRQLLNAKLI
TQRKFDNLTK AERGGLSELD KAGFIKRQLV ETRQITKHVA QILDSRMNTK YDENDKLIRE
VKVITLKSKL VSDERKDFQF YKVREINNYH RAHDAYLNAV VGTALINKYP KLESEFVYGD
YKVYDVRKMI AKSEQEIGKA TAKYFFYSNI MNFFKTEITL ANGEIRKRPL IETNGETGEI
VWDKGRDFAT VRKVLSMPQV NIVKKTEVQT GGFSKESILP KRNSDKLIAR KKDWDPKKYG
GEDSPTVAYS VLVVAKVEKG NSKKLKSVKE LLGITIMERS SFEKNPIDFL EAKGYKEVKK
DLIIKLPKYS LFELENGRKR MLASAGELQK GNELALPSKY VNFLYLASHY EKLKGSPEDN
EQKQLFVEQH KHYLDEIIEQ ISEFSKRVIL ADANLDKVLS AYNKHRDKPI REQAENIIHL
FTLTNLGAPA AFKYFDTTID RKRYTSTKEV LDATLIHQSI TGLYETRIDL SQLGGDSRAD
PKKKRKVHHH HHH
iProt106519 (SEQ ID NO: 113):
MGSSHHHHHH HHENLYFQGS MDKKYSIGLD IGTNSVGWAV ITDEYKVPSK KEKVLGNTDR
HSIKKNLIGA LLFDSGETAE ATRLKRTARR RYTRRKNRIC YLQEIFSNEM AKVDDSFFHR
LEESFLVEED KEHERHPIFG NIVDEVAYHE KYPTIYHLRK KLVDSTDKAD LRLIYLALAH
MIKFRGHFLI EGDLNPDNSD VDKLFIQLVQ TYNQLFEENP INASGVDAKA ILSARLSKSR
RLENLIAQLP GEKKNGLFGN LIALSLGLTP NFKSNFDLAE DAKLQLSKDT YDDDLDNLLA
QIGDQYADLF LAAKNLSDAI LLSDILRVNT EITKAPLSAS MIKRYDEHHQ DLTLLKALVR
QQLPEKYKEI FFDQSKNGYA GYIDGGASQE EFYKFIKPIL EKMDGTEELL VKLNREDLLR
KQRTFDNGSI PHQIHLGELH AILRRQEDFY PFLKDNREKI EKILTFRIPY YVGPLARGNS
RFAWMTRKSE ETITPWNFEE VVDKGASAQS FIERMTNFDK NLPNEKVLPK HSLLYEYFTV
YNELTKVKYV TEGMRKPAFL SGEQKKAIVD LLFKTNRKVT VKQLKEDYFK KIECFDSVEI
SGVEDRFNAS LGTYHDLLKI IKDKDFLDNE ENEDILEDIV LTLTLFEDRE MIEERLKTYA
HLFDDKVMKQ LKRRRYTGWG RLSRKLINGI RDKQSGKTIL DFLKSDGFAN RNFMQLIHDD
SLTFKEDIQK AQVSGQGDSL HEHIANLAGS PAIKKGILQT VKVVDELVEV MGRHKPENIV
IEMARENQTT QKGQKNSRER MKRIEEGIKE LGSQILKEHP VENTQLQNEK LYLYYLQNGR
DMYVDQELDI NRLSDYDVDH IVPQSFLKDD SIDNKVLTRS DKNRGKSDNV PSEEVVKKMK
NYWRQLLNAK LITQRKFDNL TKAERGGLSE LDKAGFIKRQ LVETRQITKH VAQILDSRMN
TKYDENDKLI REVKVITLKS KLVSDFRKDF QFYKVREINN YHHAHDAYLN AVVGTALIKK
YPKLESEFVY GDYKVYDVRK MIAKSEQEIG KATAKYFFYS NIMNFFKTEI TLANGEIRKR
PLIETNGETG EIVWDKGRDF ATVRKVLSMP QVNIVKKTEV QTGGFSKESI LPKRNSDKLI
ARKKDWDPKK YGGFDSPTVA YSVLVVAKVE KGKSKKLKSV KELLGITIME RSSFEKNPID
FLEAKGYKEV KEDLIIKLPK YSLFELENGR KRMLASAGEL QKGNELALPS KYVNFLYLAS
HYEKLKGSPE DNEQKQLFVE QHKEYLDEII EQISEFSKRV ILADANLDKV LSAYNKHRDK
PIREQAENII HLFTLTNLGA PAAFKYFDTT IDRKPYTSTK EVLDATLIHQ SITGLYETRI
DLSQLGGDGG GSPKKKRKV
iProt106520 (SEQ ID NO: 114):
MAHHHHHHGG SPKKKRKVDK KYSIGLDIGT NSVGWAVITD EYKVPSKKFK VLGNTDRHSI
KKNLIGALLF DSGETAEATR LKRTARRRYT RRKNRICYLQ EIFSNEMAKV DDSFFHRLEE
SFLVEEDKKH ERHPIFGNIV DEVAYHEKYP TIYHLRKKLV DSTDKADLRL IYLALAHMIK
FRGHFLIEGD LNPDNSDVDK LFIQLVQTYN QLFEENPINA SGVDAKAILS ARLSKSRRLE
NLIAQLPGEK KNGLFGNLIA LSLGLTPNFK SNFDLAEDAK LQLSKDTYDD DLDNLLAQIG
DQYADLFLAA KNLSDAILLS DILRVNTEIT KAPLSASMIK RYDEHHQDLT LLKALVRQQL
PEKYKEIFFD QSKNGYAGYI DGGASQEEFY KFIKPILEKM DGTEELLVKL NREDLLRKQR
TFDNGSIPHQ IHLGELHAIL RRQEDFYPFL KDNREKIEKI LTFRIPYYVG PLARGNSRFA
WMTRKSEETI TPWNFEEVVD KGASAQSFIE RMTNFDKNLP NEKVLPKHSL LYEYFTVYNE
LTKVKYVTEG MRKPAFLSGE QKKAIVDLLF KTNRKVTVKQ LKEDYFKKIE CFDSVEISGV
EDRFNASLGT YHDLLKIIKD KDFLDNEENE DILEDIVLTL TLFEDREMIE ERLKTYAHLF
DDKVMKQLKR RRYTGWGRLS RKLINGIRDK QSGKTILDFL KSDGFANRNF MQLIHDDSLT
FKEDIQKAQV SGQGDSLHEH IANLAGSPAI KKGILQTVKV VDELVKVMGR HKPENIVIEM
ARENQTTQKG QKNSRERMKR IEEGIKELGS QILKEHPVEN TQLQNEKLYL YYLQNGRDMY
VDQELDINRL SDYDVDHIVP QSFLKDDSID NEVLTRSDKN RGKSDNVPSE EVVKKMKNYW
RQLLNAKLIT QRKFDNLTKA ERGGLSELDK AGFIKRQLVE TRQITKHVAQ ILDSRMNTKY
DENDKLIREV KVITLKSKLV SDFRKDFQFY KVREINNYHH AHDAYLNAVV GTALIKKYPK
LESEFVYGDY KVYDVRKMIA KSEQEIGKAT AKYFFYSNIM NFFKTEITLA NGEIRKRPLI
ETNGETGEIV WDKGRDFATV RKVLSMPQVN IVKKTEVQTG GFSKESILPK RNSDKLIARK
KDWDPKKYGG FDSPTVAYSV LVVAKVEKGK SKKLKSVKEL LGITIMERSS FEKNPIDFLE
AKGYKEVKKD LIIKLPKYSL FELENGRKRM LASAGELQKG NELALPSKYV NFLYLASHYE
KLKGSPEDNE QKQLFVEQHK HYLDEIIEQI SEFSKRVILA DANLDKVLSA YNKHRDKPIR
EQAENIIHLF TLTNLGAPAA FKYFDTTIDR KRYTSTKEVL DATLIHQSIT GLYETRIDLS
QLGGDSRADP KKKRKV
iProt106521 (SEQ ID NO: 115):
MAPKKKRKVD KKYSIGLDIG TNSVGWAVIT DEYKVPSKKF KVLGNTDRHS IKKNLIGALL
FDSGETAEAT RLKRTARRRY TRRKNRICYL QEIFSNEMAK VDDSFFHRLE ESFLVEEDKK
HERHPIFGNI VDEVAYHEKY PTIYHLRKKL VDSTDKADLR LIYLALAHMI KFRGHFLIEG
DLNPDNSDVD KLFIQLVQTY NQLFEENPIN ASGVDAKAIL SARLSKSRRL ENLIAQLPGE
KKNGLFGNLI ALSLGLTPNF KSNFDLAEDA KLQLSKDTYD DDLDNLLAQI GDQYADLFLA
ARNLSDAILL SDILRVNTEI TKAPLSASMI KRYDEHHQDL TLLKALVRQQ LPEKYKEIFF
DQSKNGYAGY IDGGASQEEF YKFIKPILEK MDGTEELLVK LNREDLLRKQ RTFDNGSIPH
QIHLGELHAI LRRQEDFYPF LKDNREKIEK ILTFRIPYYV GPLARGNSRF AWMTRKSEET
ITPWNFEEVV DKGASAQSFI ERMTNFDKNL PNEKVLPKHS LLYEYFTVYN ELTKVKYVTE
GMRNPAFLSG EQKKAIVDLL FKTNRKVTVK QLKEDYFKKI ECFDSVEISG VEDRFNASLG
TYHDLLKIIK DKDFLDNEEN EDILEDIVLT LTLFEDREMI EERLKTYAHL FDDKVMKQLK
RRRYTGWGRL SRKLINGIRD KQSGRTILDF LKSDGFANRN FMQLIHDDSL TFKEDIQKAQ
VSGQGDSLHE HIANLAGSPA IKKGILQTVK VVDELVKVMG RHKPENIVIE MARENQTTQK
GQKNSRERMK RIEEGIKELG SQILKEHPVE NTQLQNEKLY LYYLQNGRDM YVDQELDINR
LSDYDVDHIV PQSFLKDDSI DNKVLTRSDK NRGKSDNVPS EEVVKKMKNY WRQLLNAKLI
TQRNEDNLTK AERGGLSELD KAGFIKRQLV ETRQITKHVA QILDSRMNTK YDENDKLIRE
VKVITLKSKL VSDFRKDFOF YKVREINNYH HAHDAYLNAV VGTALIKKYP KLESEFVYGD
YKVYDVRKMI AKSEQEIGKA TAKYFFYSNI MNFFKTEITL ANGEIRKRPL IETNGETGEI
VWDKGPDFAT VRKVLSMPQV NIVKKTEVQT GGFSKESILP KRNSDKLIAR KNDWDPKKYG
GFDSPTVAYS VLVVAKVEKG KSKKLKSVKE LLGITIMERS SFEKNPIDFL EAKGYKEVKK
DLIIKLPKYS LFELENGRKR MLASAGELQK GNELALPSKY VNFLYLASHY EKLKGSPEDN
EQKQLFVEQH KEYLDEIIEQ ISEFSKRVIL ADANLDKVLS AYNKHRDKPI REQAENIIHL
FTLTNLGAPA AFKYFDTTID RKRYTSTKEV LDATLIHQSI TGLYETRIDL SQLGGDSRAD
HHHHHH
iProt106522 (SEQ ID NO: 116):
MAHHHHHHGG SDKKYSIGLD IGTNSVGWAV ITDEYKVPSK KFKVLGNTDR HSIKKNLIGA
LLFDSGETAE ATRLKRTARR RYTRRKNRIC YLQEIFSNEM AKVDDSFFHR LEESFLVEED
KKHERHPIFG NIVDEVAYHE KYPTIYHLRK KLVDSTDKAD LRLIYLALAH MIKFRGHFLI
EGDLNPDNSD VDKLFIQLVQ TYNQLFEENP INASGVDAKA ILSARLSKSR RLENLIAQLP
GEKKNGLFGN LIALSLGLTP NEKSNFDLAE DAKLQLSKDT YDDDLDNLLA QIGDQYADLF
LAAKNLSDAI LLSDILRVNT EITKAPLSAS MINRYDEHHQ DLTLLKALVR QQLPEKYKEI
FFDQSKNGYA GYIDGGASQE EFYKFIKPIL EKMDGTEELL VKLNREDLLR KQRTFDNGSI
PHQIHLGELH AILRRQEDFY PFLKDNREKI EKILTFRIPY YVGPLARGNS RFAWMTRKSE
ETITPWNFEE VVDKGASAQS FIERMTNFDK NIPNEKVLPK HSLLYEYFTV YNELTKVKYV
TEGMRKPAFL SGEQKKAIVD LLFKTNRKVT VKQLKEDYFK KIECFDSVEI SGVEDRFNAS
LGTYHDLLKI IKDKDFLDNE ENEDILEDIV LTLTLFEDRE MIEERLKTYA HLFDDKVMKQ
LKRRRYTGWG RLSRKLINGI RDKQSGKTIL DFLKSDGFAN RNFMQLIHDD SLITKEDIQK
AQVSGQGDSL HEHIANLAGS PAIKKGILQT VKVVDELVKV MGRHKPENIV IEMARENQTT
QKGQKNSRER MKRIEEGIKE LGSQILKEHP VENTQLQNEK LYLYYLQNGR DMYVDQELDI
NRLSDYDVDH IVPQSFLKDD SIDNKVLTRS DKNRGKSDNV PSEEVVKKMK NYWRQLLNAK
LITQRKFDNL TKAERGGLSE LDKAGFIKRQ LVETRQITKH VAQILDSRMN TKYDENDKLI
REVKVITLKS KLVSDFRKDF QFYKVREINN YHHAHDAYLN AVVGTALIKK YPKLESEFVY
GDYKVYDVRK MIAKSEQEIG KATAKYFFYS NIMNFFKTEI TLANGEIRKR PLIETNGETG
EIVWDKGRDF ATVRKVLSMP QVNIVKKTEV QTGGFSKESI LPKRNSDKLI ARKKDWDPKK
YGGFDSPTVA YSVLVVAKVE KGKSKKLKSV KELLGITIME RSSFEKNPID FLEAKGYKEV
KKDLIIKLPK YSLFELENGR KRMLASAGEL QKGNELALPS KYVNFLYLAS HYEKLKGSPE
DNEQKQLFVE QHKHYLDEII EQISEFSKRV ILADANLDKV LSAYNKHRDK PIREQAENII
HLFTLTNLGA PAAFKYFDTT IDRKRYTSTK EVLDATLIHQ SITGLYETRI DLSQLGGDSR
ADPKKKRKV
iProt106658 (SEQ ID NO: 117):
MGSSHHHHHH HHENLYFQGS MDKKYSIGLD IGTNSVGWAV ITDEYKVTSK KFKVLGNTDR
HSIKKNLIGA LLFDSGETAE ATRLKRTARR RYTRRKNRIC YLQEIFSNEM AKVDDSFFHR
LEESFLVEED KKHERHPIFG NIVDEVAYHE KYPTIYHLRK KLVDSTDKAD LRLIYLALAH
MIKFRGHFLI EGDLNPDNSD VDKLFIQLVQ TYNQLFEENP INASGVDAKA ILSARLSKSR
RLENLIAQLP GEKKNGLFGN LIALSLGLTP NFKSNFDLAE DAKLQLSKDT YDDDLDNILA
QIGDQYADLF LAAKNLSDAI LLSDILRVNT EITKAPLSAS MIKRYDEHHQ DLTLLKALVR
QQLPEKYKEI FFDQSKNGYA GYIDGGASQE EFYKFIKPIL EKMDGTEELL VKLNREDLLR
KQRTFDNGSI PHQIHLGELH AILRRQEDFY PFLKDNREKI EKILTFRIPY YVGPLARGNS
RFAWMTRKSE ETITPWNFEE VVDKGASAQS FIERMTNFDK NLPNEKVLPK HSLLYEYFTV
YNELTKVKYV TEGMRKPAFL SGEQKKAIVD LLFKTNRKVT VKQLKEDYFK KIECFDSVEI
SGVEDRFNAS LGTYHDLLKI IKDKDFLDNE ENEDILEDIV LTLTLFEDRE MIEERLKTYA
HLFDDKVMKQ LKRRRYTGWG RLSRKLINGI RDNQSGNTIL DFLKSDGFAN RNFMQLIHDD
SLTFKEDIQK AQVSGQGDSL HEHIANLAGS PAIKKGILQT VKVVDELVKV MGRHKPENIV
IEMARENQTT QKGQKNSRER MKRIEEGIKE LGSQILKEHP VENTQLQNEK LYLYYIQNGR
DMYVDQELDI NRLSDYDVDH IVPQSFLKDD SIDNNVLTRE DKNRGKSDNV PSEEVVKKMK
NYWRQLLNAK LITQRKFDNL TKAERGGLSE LDKAGFIKRQ LVETRQITKH VAQILDSRMN
TKYDENDKLI REVEVITLKS KLVSDFRKDF QFYKVREINN YHHAHDAYLN AVVGTALIKK
YPKLESEFVY GDYKVYDVRK MIAKSEQEIG KATAKYFFYS NIMNFFKTEI TLANGEIRKR
PLIETNGETG EIVWDKGRDF ATVRKVLSMP QVNIVKKTEV QTGGESKESI LPKRNSDKLI
ARKKDWDPKK YGGFDSPTVA YSVLVVAKVE KGKSKKLKSV KELLGITIME RSSFEKNPID
FLEAKGYKEV KKDLIIKLPK YSLFELENGR KRMLASAGEL QKGNELALPS KYVNFLYLAS
HYEKLKGSPE DNEQKOLFVE QHKHYLDEII EQISEFSKRV ILADANLDKV LSAYNKHRDK
PIREQAENII HLFTLTNLGA PAAFKYFDTT IDRKRYTSTK EVLDATLIHQ SITGLYETRI
DLSQLGGDGG GSPKKKRNV
iProt106745 (SEQ ID NO: 118):
MAPKKKRKVD KKYSIGLDIG TNSVGWAVIT DEYKVPSKKF KVLGNTDRHS IKKNLIGALL
FDSGETAEAT RLKRTARRRY TRRKNRICYL QEIFSNEMAK VDDSFFHRLE ESFLVEEDKK
HERHPIFGNI VDEVAYHEKY PTIYHLRKKL VDSTDKADLR LIYLALAHMI KFRGHFLIEG
DLNPDNSDVD KLFIQLVQTY NQLFEENPIN ASGVDAKAIL SARLSKSRRL ENLIAQLPGE
KNNGLFGNLI ALSLGLTPNF KSNFDLAEDA KLQLSKDTYD DDLDNLLAQI GDQYADLFLA
AKELSDAILL SDILRVNTEI TKAPLSASMI KRYDEHHQDL TLLKALVRQQ LPEKYKEIFF
DQSKNGYAGY IDGGASQEEF YKFIKPILEK MDGTEELLVK LNREDLLRKQ RTFDNGSIPH
QIHLGELHAI LRRQEDFYPF LKDNREKIEK ILTFRIPYYV GPLARGNSRF AWMTRKSEET
ITPWNFEEVV DKGASAQSFI ERMTNFDKNL PNEKVLPKHS LLYEYFTVYN ELTKVKYVTE
GMRKPAFLSG EQKKAIVDLL FKTNRKVTVK QLKEDYFKKI ECFDSVEISG VEDRFNASLG
TYHDLLKIIK DKDFLDNEEN EDILEDIVLT LTLFEDREMI EERLKTYAHL FDDKVMEQLK
RRRYTGWGRL SRKLINGIRD NQSGKTILDF LKSDGFANRN FMQLIHDDSL TEKEDIQKAQ
VSGQGDSLHE HIANLAGSPA IKKGILQTVK VVDELVKVMG RHKPENIVIE MARENQTTQK
GQKNSRERMK RIEEGIKELG SQILKEHPVE NIQLQNEKLY LYYLQNGRDM YVDQELDINR
LSDYDVDHIV PQSFLNDDSI DNAVLTRSDK NRGKSDNVPS EEVVKKMKNY WRQLLNAKLI
TQRKEDNLTK AERGGLSELD KAGFIKRQLV ETRQITKHVA QILDSRMNTK YDENDKLIRE
VKVITLKSKL VSDFRKDFQF YKVREINNYH HAHDAYLNAV VGTALIKKYP KLESEFVYGD
YKVYDVRKMI AKSEQEIGKA TAKYFFYSNI MNFFKTEITL ANGEIRKRPL IETNGETGEI
VWDKGRDFAT VRKVLSMPQV NIVKKTEVQT GGFSKESILP KRNSDKLIAR KKDWDPKKYG
GFDSPTVAYS VIVVAKVEKG KSKKLKSVKE LLGITIMERS SFEKNPIDFL EAKGYKEVKK
DLIIKLPKYS LFELENGRKR MLASAGELQK GNELALPSKY VNFLYLASHY EKLNGSPEDN
EQKQLFVEQH KHYLDEIIEQ ISEFSKRVIL ADANLDKVLS AYNKHRDKPI REQAENIIHL
FTLTNLGAPA AFKYFDTTID RKRYTSTKEV LDATLIHQSI TGLYETRIDL SQLGGDSRAD
PNKKRKVHHH HHH
iProt106746 (SEQ ID NO: 119):
MAPKKKRKVD KEYSIGLDIG TNSVGWAVIT DEYKVPSKKF KVLGNTDRHS IKKNLIGALL
FDSGETAEAT RLKRTARRRY TRRKNRICYL QEIFSNEMAK VDDSFFHRLE ESFLVEEDKK
HERHPIFGNI VDEVAYHEKY PTIYHLRKKL VDSTDKADLR LIYLALAHMI KFRGHFLIEG
DLNPDNSDVD KLFIQLVQTY NQLFEENPIN ASGVDAKAIL SARLSKSRRL ENLIAQLPGE
KKNCLFGNLI ALSLGLTPNF KSNFDLAEDA KLQLSKDTYD DDLDNLLAQI GDQYADLFLA
AKNLSDAILL SDILRVNTEI TKAPLSASMI KRYDEHHQDL TLLKALVROQ LPEKYKEIFF
DQSKNGYAGY IDGGASQEEF YKFIKPILEK MDGTEELLVK LNREDLLRKQ RTFDNGSIPH
QIHLGELHAI LRRQEDFYPF LKDNREKIEK ILTFRIPYYV GPLARGNSRF AWMTRKSEET
ITPWNFEEVV DKGASAQSFI ERMTNEDKNL PNEKVLPKHS LLYEYFTVYN ELTKVKYVTE
GMRKPAELSG EQKKAIVDLL FKTNRKVTVK QLKEDYFKKI ECFDSVEISG VEDRFNASLG
TYHDLLKIIK DKDFLDNEEN EDILEDIVLT LTLEEDREMI EERLKTYAHI FDDKVMKQLK
RRRYTGWGRL SRKLINGIRD KQSGKTILDF LKSDGFANRN FMQLIHDDSL TFKEDIQKAQ
VSGQGDSLHE HIANLAGSPA IKKGILQTVK VVDELVKVMG RHKPENIVIE MARENQTTQK
GQKNSRERMK RIEEGIKELG SQILKEHPVE NTQLQNEAIY LYYLQNGRDM YVDQELDINR
LSDYDVDHIV PQSFLNDDSI DNKVLTRSDK NRGKSDNVPS EEVVKKMKNY WRQLLEAKLI
TQRKFDNLTK AERGGLSELD KAGFIKRQLV ETRQITKHVA QILDSRMNTK YDENDKLIRE
VEVITLKSKL VSDFRKDFQF YKVREINNYH HAHDAYLNAV VGTALIKKYP ALESEFVYGD
YKVYDVRKMI AKSEQEIGKA TAKYFFYSNI MNFFKTEITL ANGEIRKAPL IETNGETGEI
VWDKGRDFAT VRKVLSMPQV NIVEKTEVQT GGFSKESILP KRNSDKLIAR KKDWDPKKYG
GEDSPTVAYS VLVVANVEKG KSKKLKSVKE LLGITIMERS SFEKNPIDEL EAKGYKEVKK
DLIIKLPKYS LFELENGRKR MLASAGELQK GNELALPSKY VNFLYLASHY EKLKGSPEDN
EQKQLFVEQH KHYLDEIIEQ ISEFSKRVIL ADANLDKVLS AYNKHRDKPI REQAENIIHL
FTLTNLGAPA AFKYFDTTID RKRYTSTKEV LDATLIHQSI TGLYETRIDL SQLGGDSRAD
PNKKRKVHHH HHH
iProt106747 (SEQ ID NO: 120):
MAPKKKRKVD KKYSIGLDIG TNSVGWAVIT DEYKVPSKKF KVLGNTDRHS IKKNLIGALL
FDSGETAEAT RLKRTARRRY TRRENRICYL QEIFSNEMAK VDDSFFHRLE ESFLVEEDKK
HERHPIFGNI VDEVAYHEKY PTIYHLRKKL VDSTDKADLR LIYLALAHMI KFRGHFLIEG
DLNPDNSDVD KLFIQLVQTY NQLFEENPIN ASGVDAKAIL SARLSKSRRL ENLIAQLPGE
KKNGLFGNLI ALSLGLTPNF KSNEDLAEDA KLQLSKDTYD DDLDNLLAQI GDQYADLFLA
AKNLSDAILL SDILRVNTEI TKAPLSASMI KRYDEHHQDL TLLKALVRQQ LPEKYKEIFF
DQSKNGYAGY IDGGASQEEF YKFIKPILEK MDGTEELLVK LNREDLLRKQ RTFDNGSIPH
QIHLGELHAI LRRQEDFYPF LKDNREKIEK ILTFRIPYYV GPLARGNSRF AWMTRKSEET
ITPWNFEEVV DKGASAQSFI ERMTNFDKNL PNEKVLPKHS LLYEYFTVYN ELTKVKYVTE
GMRKPAFLSG EQKKAIVDLL FKTNRKVTVK QLKEDYFKKI ECFDSVEISG VEDRFNASLG
TYHDLLKIIK DKDFLDNEEN EDILEDIVLT LTLFEDREMI EERLKTYAHL FDDKVMKQLK
RRRYTGWGRL SRKLINGIRD KQSGKTILDF LKSDGFANRN FMQLIHDDSL TEKEDIQKAQ
VSGQGDSLHE HIANLAGSPA IKKGILQTVK VVDELVKVMG RHKPENIVIE MARENQTTQK
GQKNSRERMK RIEEGIKELG SQILKEHPVE NTQLQNEKLY LYYLQNGRDM YVDQELDINR
LSDYDVDHIV PQSFLADDSI DNKVLTRSDK NRGKSDNVPS EEVVKKMKNY WRQLLNAKLI
TQRKFDNLTK AERGGLSELD KAGFIKRQLV ETRQITKHVA QILDSRMNTK YDENDKLIRE
VKVITLKSKL VSDFRKDFQF YKVREINNYH HAHDAYLNAV VGTALIKKYP ALESEFVYGD
YKVYDVRKMI AKSEQEIGKA TAKYFFYSNI MNFFKTEITL ANGEIRKAPL IETNGETGEI
VWDKGRDFAT VRKVLSMPQV NIVKKTEVQT GGFSKESILP KRNSDKLIAR KKDWDPKKYG
GFDSPTVAYS VLVVAEVEKG KSKKLKSVKE LLGITIMERS SFEKNPIDFL EAKGYKEVKK
DLIIKLPKYS LFELENGRKR MLASAGELQK GNELALPSKY VNFLYLASHY EKLKGSPEDN
EQKQLFVEQH KHYLDEIIEQ ISEFSKRVIL ADANLDKVLS AYNKHRDKPI REQAENIIHL
FTLTNLGAPA AFKYFDTTID RKRYTSTKEV LDATLIHQSI TGLYETRIDL SQLGGDSRAD
PKKKRKVHHH HHH
iProt106884 (SEQ ID NO: 121):
MAPKKKRKVD KEYSIGLDIG TNSVGWAVIT DEYKVPSKKF KVLGNTDRHS IKKNLIGALL
FDSGETAEAT RIKRTARRRY TRRKNRICYL QEIFSNEMAK VDDSFFHRLE ESFLVEEDKK
HERHPIFGNI VDEVAYHEKY PTIYHLRKKL VDSTDKADLR LITLALAHMI KFRGHFLIEG
DLNPDNSDVD KLFIQLVQTY NQLFEENPIN ASGVDAKAIL SARLSKSRRL ENTIAQLPGE
KKNGLFGNLI ALSLGLTPNF NSNFDLAEDA KLQLSKDTYD DDLDNLLAQI GDQYADLFLA
AKNLSDAILL SDILRVNTEI TKAPLSASMI KRYDEHHQDL TLLKALVRQQ LPEKYKEIFF
DQSKNGYAGY IDGGASQEEF YKFIKPILEK MDGTEELLVK LNREDLLRKQ RTFDNGSIPH
QIHLGELHAI LRRQEDFYPF LKDNREKIEK ILTFRIPYYV GPLARGNSRF AWMTRKSEET
ITPWNFEEVV DKGASAQSFI ERMTAFDKNL PNEKVLPKHS LLYEYFTVYN ELTKVKYVTE
GMRKPAFLSG EQKKAIVDLL FKTNRKVTVK QLKEDYFKKI ECFDSVEISG VEDRFNASLG
TYHDLLKIIK DKDFLDNEEN EDILEDIVLT LTLFEDREMI EERLKTYAHL FDDKVMKQLK
RRRYTGWGAL SRKLINGIRD KQSGKTILDF LKSDGFANRN FMALIHDDSL TFKEDIQKAQ
VSGQGDSLHE HIANLAGSPA IKKGILQTVK VVDELVKVMG RHKPENIVIE MARENQTTQK
GQKNSRERMK RIEEGIKELG SQILKEHPVE NTQLQNEKLY LYYLQNGRDM YVDQELDINR
LSDYDVDHIV PQSFLKDDSI DNKVLTRSDK NRGKSDNVPS EEVVKKMKNY WRQLLNAKLI
TQRKFDNLTK AERGGLSELD KAGFIKRQLV ETRAITKHVA QILDSRMNTK YDENDKLIRE
VKVITLKSKL VSDERKDFQF YKVREINNYH HAHDAYLNAV VGTALIKKYP KLESEFVYGD
YKVYDVRKMI AKSEQEIGKA TAKYFFYSNI MNFFKTEITL ANGEIRKAPL IETNGETGEI
VWDKGRDFAT VRKVLSMPQV NIVKKTEVQT GGFSKESILP KRNSDKLIAR KKDWDPKKYG
GFDSPTVAYS VLVVAKVEKG KSKKLKSVKE LLGITIMERS SFEKNPIDFL EAKGYKEVKK
DLIIKLPKYS LFELENGRKR MLASAGELQK GNELALPSKY VNFLYLASHY EKLKGSPEDN
EQKQLFVEQH KHYLDEIIEQ ISEFSKRVIL ADANLDKVLS AYNKHRDKPI REQAENIIHL
FTLTNLGAPA AFKYFDTTID RKRYTSTKEV LDATLIHQSI TGLYETRIDL SQLGGDSRAD
PKKKRKVHHH HHH
iPROT 109496 (SEQ ID NO: 1870):
MAPKKKRKVDKKYSIGLDIGTNSVGWAVITDEYKVPSKKFKVLGNTDRHSIKKNLIGALLFDSGETAEATR
LKRTARRRYTRRKNRILYLQEIFSNEMAKVDDSFFHRLEESFLVEEDKKHERHPIFGNIVDEVAYHEKYPT
IYHLRKKLVDSTDKADLRLIYLALAHMIKFRGHFLIEGDLNPDNSDVDKLFIQLVQTYNQLFEENPINASG
VDAKAILSARLSKSRRLENLIAQLPGEKKNGLFGNLIALSLGLTPNFKSNFDLAEDAKLQLSKDTYDDDLD
NLLAQIGDQYADLFLAAKNLSDAILLSDILRVNTEITKAPLSASMIKRYDEHHQDLTLLKALVRQQLPEKY
KEIFFDQSKNGYAGYIDGGASQEEFYKFIKPILEKMDGTEELLVKLNREDLLRKQRTFDNGSIPHQIHLGE
LHAILRRQEDFYPFLKDNREKIEKILTFRIPYYVGPLARGNSRFAWMTRKSEETITPWNFEEVVDKGASAQ
SFIERMTNFDKNLPNEKVLPKHSLLYEYFTVYNELTKVKYVTEGMRKPAFLSGEQKKAIVDLLFKTNRKVT
VKQLKEDYFKKIEEFDSVEISGVEDRFNASLGTYHDLLKIIKDKDFLDNEENEDILEDIVLTLTLFEDREM
IEERLKTYAHLFDDKVMKQLKRRRYTGWGRLSRKLINGIRDKQSGKTILDFLKSDGFANPNFMQLIHDDSL
TFKEDIQKAQVSGQGDSLHEHIANLAGSPAIKKGILQTVKVVDELVKVMGRHKPENIVIEMARENQTTQKG
QKNSRERMKRIEEGIKELGSQILKEHPVENTQLQNEKLYLYYLQNGRDMYVDQELDINRLSDYDVDHIVPQ
SFLKDDSIDNKVLTRSDKNRGKSDNVPSEEVVKKMKNYWRQLLNAKLITQRKFDNLTKAERGGLSELDKAG
FIKRQLVETRQITKHVAQILDSPMNTKYDENDKLIPEVKVITLKSKLVSDFRKDFQFYKVREINNYHHAHD
AYLNAVVGTALIKKYPKLESEFVYGDYKVYDVRKMIAKSEQEIGKATAKYFFYSNIMNFFKTEITLANGEI
RKRPLIETNGETGEIVWDKGRDFATVRVLSMPLQVNIVKKTEVQTGGFSKESILPKRNSDKLIARKKDWDP
KKYGGFDSPTVAYSVLVVAKVEKGKSKKLKSVKELLGITIMERSSFEKNPIDFLEAKGYKEVKKDLIIKLP
KYSLFELENGPKPMLASAGELQKGNELALPSKYVNFLYLASHYEKLKGSPEDNEQKQLFVEQHKHYLDEII
EQISEFSKRVILADANLDKVLSAYNKHRDKPIREQAENIIHLFTLTNLGAPAAFKYFDTTIDRKRYTSTKE
VLDATLIHQSITGLYETRIDLSQLGGSPADHHHHHH

### Nucleic Acids Encoding Cas9 Molecules

[0527] Nucleic acids encoding the Cas9 molecules discussed above, e.g., an active Cas9 molecule or an inactive Cas9 molecule, are provided herein.

[0528] Exemplary nucleic acids encoding Cas9 molecules are described in Cong et al, SCIENCE 2013, 399(6121):819-823; Wang et al, CELL 2013, 153(4):910-918; Mali et al., SCIENCE 2013, 399(6121):823-826; Jinek et al, SCIENCE 2012, 337(6096):816-821.

[0529] In an embodiment, a nucleic acid encoding a Cas9 molecule can be a synthetic nucleic acid sequence. For example, the synthetic nucleic acid molecule can be chemically modified, e.g., as described in Section XII. In an embodiment, the Cas9 mRNA has one or more of, e.g., all of the following properties: it is capped, polyadenylated, substituted with 5-methylcytidine and/or pseudouridine.

[0530] In addition or alternatively, the synthetic nucleic acid sequence can be codon optimized, e.g., at least one non-common codon or less-common codon has been replaced by a common codon. For example, the synthetic nucleic acid can direct the synthesis of an optimized messenger mRNA, e.g., optimized for expression in a mammalian expression system, e.g., described herein.

[0531] Provided below is an exemplary codon optimized nucleic acid sequence encoding a Cas9 molecule of S. pyogenes.

| (SEQ ID NO: 122) | |
|---|---|
| atggataaaa agtacagcat cgggctggac atcggtacaa actcagtggg gtgggccgtg | 60 |
| attacggacg agtacaaggt accctccaaa aaatttaaag tgctgggtaa cacggacaga | 120 |
| cactctataa agaaaaatct tattggagcc ttgctgttcg actcaggcga gacagccgaa | 180 |
| gccacaaggt tgaagcggac cgccaggagg cggtatacca ggagaaagaa ccgcatatgc | 240 |
| tacctgcaag aaatcttcag taacgagatg gcaaaggttg acgatagctt tttccatcgc | 300 |
| ctggaagaat cctttcttgt tgaggaagac aagaagcacg aacggcaccc cacctttggc | 360 |
| aatattgtcg acgaagtggc atatcacgaa aagtacccga ctatctacca cctcaggaag | 420 |
| aagctggtgg actctaccga taaggcggac ctcagactta tttatttggc actcgcccac | 480 |
| atgattaaat ttagaggaca tttcttgatc gagggcgacc tgaacccgga caacagtgac | 540 |
| gtcgataagc tgttcatcca acttgtgcag acctacaatc aactgttcga agaaaaccct | 600 |
| ataaatgctt caggagtcga cgctaaagca atcctgtccg cgcgcctctc aaaatctaga | 660 |
| agacttgaga atctgattgc tcagttgccc ggggaaaaga aaaatggatt gtttggcaac | 720 |
| ctgatcgccc tcagtctcgg actgacccca aatttcaaaa gtaacttcga cctggccgaa | 780 |
| gacgctaagc tccagctgtc caaggacaca tacgatgacg acctcgacaa tctgctggcc | 840 |
| cagattgggg atcagtacgc cgatctcttt ttggcagcaa agaacctgtc cgacgccatc | 900 |
| ctgttgagcg atatcttgag agtgaacacc gaaattacta aagcacccct tagcgcatct | 960 |
| atgatcaagc ggtacgacga gcatcatcag gatctgaccc tgctgaaggc tcttgtgagg | 1020 |
| caacagctcc ccgaaaaata caaggaaatc ttctttgacc agagcaaaaa cggctacgct | 1080 |
| ggctatatag atggtggggc cagtcaggag gaattctata aattcatcaa gcccattctc | 1140 |
| gagaaaatgg acggcacaga ggagttgctg gtcaaactta acagggagga cctgctgcgg | 1200 |
| aagcagcgga cctttgacaa cgggtctatc ccccaccaga ttcatctagg cgaactgcac | 1260 |
| gcaatcctga ggaggcagga ggatttttat ccttttctta aagataaccg cgagaaaata | 1320 |
| gaaaagattc ttacattcag gatcccgtac tacgtgggac ctctcgcccg gggcaattca | 1380 |
| cggtttgcct ggatgacaag gaagtcagag gagactatta caccttggaa cttcgaagaa | 1440 |
| gtggtggaca agggtgcatc tgcccagtct ttcatcgagc ggatgacaad ttttgacaag | 1500 |
| aacctcccta atgagaaggt gctgcccaaa cattctctgc tctacgagta ctttaccgtc | 1560 |
| tacaatgaac tgactaaagt caagtacgtc accgagggaa tgaggaagcc ggcattcctt | 1620 |
| agtggagaac agaagaaggc gattgtagac ctgttgttca agaccaacag gaaggtgact | 1680 |
| gtgaagcaac ttaaagaaga ctactttaag aagatcgaat gttttgacag tgtggaaatt | 1740 |
| tcagaggttg aagaccgctt caatgcgtca ttggggactt accatgatct tctcaagatc | 1800 |
| ataaaggaca aagacttcct ggacaacgaa gaaaatgagg atattctcga agacatcgtc | 1860 |
| ctcaccctga ccctgttcga agacagggaa atgatagaag agcgcttgaa aacctatgcc | 1920 |
| cacctcttcg acgataaagt tatgaagcag ctgaagcgca ggagatacac aggatgggga | 1980 |
| agattgtcaa ggaagctgat caatggaatt agggataaac agagtggcaa gaccatactg | 2040 |
| gatttcctca aatctgatgg cttcgccaat aggaacttca tgcaactgat tcacgatgac | 2100 |
| tctcttacct tcaaggagga cattcaaaag gctcaggtga gcgggcaggg agactccctt | 2160 |
| catgaacaca tcgcgaattt ggcaggttcc cccgctatta aaaagggcat ccttcaaact | 2220 |
| gtcaaggtgg tggatgaatt ggtcaaggta atgggcagac ataagccaga aaatattgtg | 2280 |
| atcgagatgg cccgcgaaaa ccagaccaca cagaagggcc agaaaaatag tagagagcgg | 2340 |
| atgaagagga tcgaggaggg catcaaagag ctgggatctc agattctcaa agaacacccc | 2400 |
| gtagaaaaca cacagctgca gaacgaaaaa ttgtacttgt actatctgca gaacggcaga | 2460 |
| gacatgtacg tcgaccaaga acttgatatt aatagactgt ccgactatga cgtagaccat | 2520 |
| atcgtgcccc agtccttcct gaaggacgac tccattgata acaaagtctt gacaagaagc | 2580 |
| gacaagaaca ggggtaaaag tgataatgtg cctagcgagg aggtggtgaa aaaaatgaag | 2640 |
| aactactggc gacagctgct taatgcaaag ctcattacac aacggaagtt cgataatctg | 2700 |
| acgaaagcag agagaggtgg cttgtctgag ttggacaagg cagggtttat taagcggcag | 2760 |
| ctggtggaaa ctaggcagat cacaaagcac gtggcgcaga ttttggacag ccggatgaac | 2820 |
| acaaaatacg acgaaaatga taaactgata cgagaggtca aagttatcac gctgaaaagc | 2880 |
| aagctggtgt ccgattttcg gaaagacttc cagttctaca aagttcgcga gattaataac | 2940 |
| taccatcatg ctcacgatgc gtacctgaac gctgttgtcg ggaccgcctt gataaagaag | 3000 |
| tacccaaagc tggaatccga gttcgtatac ggggattaca aagtgtacga tgtgaggaaa | 3060 |
| atgatagcca agtccgagca ggagattgga aaggccacag ctaagtactt cttttattct | 3120 |
| aacatcatga atttttttaa gacggaaatt accctggcca acggagagat cagaaagcgg | 3180 |
| ccccttatag agacaaatgg tgaaacaggt gaaatcgtct gggataaggg cagggatttc | 3240 |
| gctactgtga ggaaggtgct gagtatgcca caggtaaata tcgtgaaaaa aaccgaagta | 3300 |
| cagaccggag gattttccaa ggaaagcatt ttgcctaaaa gaaactcaga caagctcatc | 3360 |
| gcccgcaaga aagattggga ccctaagaaa tacgggggat ttgactcacc caccgtagcc | 3420 |
| tattctgtgc tggtggtagc taaggtggaa aaaggaaagt ctaagaagct gaagtccgtg | 3480 |
| aaggaactct tgggaatcac tatcatggaa agatcatcct ttgaaaagaa ccctatcgat | 3540 |
| ttcctggagg ctaagggtta caaggaggtc aagaaagacc tcatcattaa actgccaaaa | 3600 |
| tactctctct tcgagctgga aaatggcagg aagagaatgt tggccagcgc cggagagctg | 3660 |
| caaaagggaa acgagcttgc tctgccctcc aaatatgtta attttctcta tctcgcttcc | 3720 |
| cactatgaaa agctgaaagg gtctcccgaa gataacgagc agaagcagct gttcgtcgaa | 3780 |
| cagcacaagc actatctgga tgaaataatc gaacaaataa gcgagttcag caaaagggtt | 3840 |
| atcctggcgg atgctaattt ggacaaagta ctgtctgctt ataacaagca ccgggataag | 3900 |
| cctattaggg aacaagccga gaatataatt cacctcttta cactcacgaa tctcggagcc | 3960 |
| cccgccgcct tcaaatactt tgatacgact atcgaccgga aacggtatac cagtaccaaa | 4020 |
| gaggtcctcg atgccaccct catccaccag tcaattactg gcctgtacga aacacggatc | 4080 |
| gacctctctc aactgggcgg cgactag | 4107 |

[0532] If a Cas9 sequence, e.g., the sequence listed above, is fused with a peptide or polypeptide at the C-terminus (e.g., an inactive Cas9 fused with a transcription repressor at the C-terminus), it is understood that the stop codon will be removed.

### IV. Chimeric Antigen Receptors

[0533] Disclosed herein are chimeric antigen receptor (CAR) immune effector cells, e.g., T cells, or chimeric TCR-transduced immune effector cells, e.g., T cells. In some embodiments, disclosed herein are improved CAR immune effector cells modified in a first target, i.e., a molecule that regulates the expression of MHC II (e.g., HLA-DM, HLA-DO, HLA-DR, HLA-DQ, HLA-DP, CIITA, RFXANK, RFXAP, RFX1, RFX5, NF-YA, NF-YB, NF-YC, X2BP, or OCAB), and a second target, i.e., a component of the T cell system (e.g., TRAC, TRBC1, TRBC2, CD247, CD3, CD3D, CD3E, CD3G, DCK, CD52, FKBP1A, or NR3C1). In some embodiments, the cells are further modified in a third target, i.e., a molecule that regulates the expression of MHC I (e.g., HLA-A, HLA-B, HLA-C, B2M, and NLRC5). In some embodiments, the CAR immune effector cells are modified in a first target, i.e., a molecule that regulates the expression of MHC II, and a second target, i.e., a component of the T cell system, to specifically disrupt MHC II and/or T cell system function and/or insert a heterologous protein specifically at each position. In some embodiments, the cells are further modified in a third target, i.e., a molecule that regulates the expression of MHC I, to further disrupt MHC I function. In some embodiments, the disclosure provides for gRNA molecules and CRISPR systems for use in connection with these adoptive immunotherapy methods and reagents to produce CAR immune effector cells, e.g., T cells, or chimeric TCR-transduced immune effector cells, e.g., T cells.

[0534] The gRNA molecules and CRISPR systems can be used to create adoptive immunotherapy cells and compositions with improved properties, such as efficacy and safety. This section describes, in some embodiments, CAR technology in conjunction with the gRNA molecules and CRISPR systems disclosed herein, and describes improved CAR reagents, e.g., cells and compositions, and methods. Other methods for inserting chimeric antigen receptors into immune effector cells can also be employed, including those described herein or otherwise known to the skilled artisan.

[0535] In general, aspects of the disclosure pertain to or include an isolated nucleic acid molecule encoding a chimeric antigen receptor (CAR), wherein the CAR comprises an antigen binding domain (e.g., antibody or antibody fragment, TCR or TCR fragment) that binds to a tumor antigen as described herein, a transmembrane domain (e.g., a transmembrane domain described herein), and an intracellular signaling domain (e.g., an intracellular signaling domain described herein). In various embodiments, the intracellular signaling domain comprises a costimulatory domain (e.g., a costimulatory domain described herein) and/or a primary signaling domain (e.g., a primary signaling domain described herein).

[0536] In other aspects, the disclosure includes: host cells containing the above nucleic acids and isolated proteins encoded by such nucleic acid molecules. CAR nucleic acid constructs, encoded proteins, vectors containing the CAR nucleic acid constructs, host cells, pharmaceutical compositions, and methods of administration and treatment are also disclosed herein. Further details on their preparation and use are provided in International Patent Application Publication No. WO2015142675, which is incorporated by reference in its entirety.

[0537] In one aspect, the disclosure pertains to a chimeric antigen receptor (CAR) and/or an isolated nucleic acid molecule encoding the CAR, wherein the CAR comprises an antigen binding domain (e.g., antibody or antibody fragment, TCR or TCR fragment) that binds to a tumor-supporting antigen (e.g., a tumor-supporting antigen as described herein), a transmembrane domain (e.g., a transmembrane domain described herein), and an intracellular signaling domain (e.g., an intracellular signaling domain described herein. In some embodiments, the intracellular signaling domain comprises a costimulatory domain (e.g., a costimulatory domain described herein) and/or a primary signaling domain (e.g., a primary signaling domain described herein). In some embodiments, the tumor-supporting antigen is an antigen present on a stromal cell or a myeloid-derived suppressor cell (MDSC). In other aspects, the disclosure features polypeptides encoded by such nucleic acids and host cells containing such nucleic acids and/or polypeptides.

[0538] Alternatively, aspects of the disclosure pertain to isolated nucleic acid encoding a chimeric T cell receptor (TCR) comprising a TCR alpha and/or TCR beta variable domain with specificity for a cancer antigen described herein. See for example, Dembic et al., Nature, 320, 232-238 (1986), Schumacher, Nat. Rev. Immunol., 2, 512-519 (2002), Kershaw et al., Nat. Rev. Immunol., 5, 928-940 (2005), Xue et al., Clin. Exp. Immunol., 139, 167-172 (2005), Rossig et al., Mol. Ther., 10, 5-18 (2004), and Murphy et al., Immunity, 22, 403-414 (2005): (Morgan et al. J. Immmol., 171, 3287-3295 (2003), Hughes et al., Hum. Gene Ther., 16, 1-16 (2005), Zhao et al., J. Immunol., 174, 4415-4423 (2005), Roszkowski et al., Cancer Res., 65, 1570-1576 (2005), and Engels et al., Hum. Gene Ther., 16, 799-810 (2005); US2009/03046557, the contents of which are hereby incorporated by reference in their entirety. Such chimeric TCRs may recognize, for example, cancer antigens such as MART-1, gp-100, p53, and NY-ESO-1, MAGE A3/A6, MAGEA3, SSX2, HPV-16 E6 or HPV-16 E7. In other aspects, the disclosure features polypeptides encoded by such nucleic acids and host cells containing such nucleic acids and/or polypeptides.

### Targets

[0539] The present disclosure provides cells, e.g., immune effector cells (e.g., T cells, NK cells), that comprise or at any time comprised a gRNA molecule or CRISPR system as described herein, that are further engineered to contain one or more CARs that direct the immune effector cells to undesired cells (e.g., cancer cells). This is achieved through an antigen binding domain on the CAR that is specific for a cancer associated antigen. There are two classes of cancer associated antigens (tumor antigens) that can be targeted by the CARs of the instant disclosure: (1) a cancer associated antigen that is expressed on the surface of a cancer cell; and (2) a cancer associated antigen that itself is intracellular, however, a fragment of such antigen (peptide) is presented on the surface of the cancer cells by MHC (major histocompatibility complex).

[0540] In some embodiments, the tumor antigen is chosen from one or more of: CD19; CD123; CD22; CD30; CD171; CS-1 (also referred to as CD2 subset 1, CRACC, SLAMF7, CD319, and 19A24); C-type lectin-like molecule-1 (CLL-1 or CLECL1); CD33; epidermal growth factor receptor variant III (EGFRvIII); ganglioside G2 (GD2); ganglioside GD3 (aNeu5Ac(2-8)aNeu5Ac(2-3)bDGalp(1-4)bDGlcp(1-1)Cer); B cell maturation antigen (BCMA); Tn antigen ((Tn Ag) or (GalNAcα-Ser/Thr)); prostate-specific membrane antigen (PSMA); Receptor tyrosine kinase-like orphan receptor 1 (ROR1); Fms-Like Tyrosine Kinase 3 (FLT3); Tumor-associated glycoprotein 72 (TAG72); CD38; CD44v6; Carcinoembryonic antigen (CEA); Epithelial cell adhesion molecule (EPCAM); B7H3 (CD276); KIT (CD117); Interleukin-13 receptor subunit alpha-2 (IL-13Ra2 or CD213A2): Mesothelin; Interleukin 11 receptor alpha (IL-11Ra); prostate stem cell antigen (PSCA); Protease Serine 21 (Testisin or PRSS21); vascular endothelial growth factor receptor 2 (VEGFR2); Lewis(Y) antigen; CD24; Platelet-derived growth factor receptor beta (PDGFR-beta); Stage-specific embryonic antigen-4 (SSEA-4); CD20; Folate receptor alpha; Receptor tyrosine-protein kinase ERBB2 (Her2/neu); Mucin 1, cell surface associated (MUC1); epidermal growth factor receptor (EGFR); neural cell adhesion molecule (NCAM); Prostase; prostatic acid phosphatase (PAP); elongation factor 2 mutated (ELF2M); Ephrin B2; fibroblast activation protein alpha (FAP); insulin-like growth factor 1 receptor (IGF-I receptor), carbonic anhydrase IX (CAIX); Proteasome (Prosome, Macropain) Subunit, Beta Type, 9 (LMP2); glycoprotein 100 (gp100); oncogene fusion protein consisting of breakpoint cluster region (BCR) and Abelson murine leukemia viral oncogene homolog 1 (Ab1) (bcr-ab1); tyrosinase; ephrin type-A receptor 2 (EphA2); Fucosyl GM1; sialyl Lewis adhesion molecule (sLe); ganglioside GM3 (aNeu5Ac(2-3)bDGalp14)bDGlcp(1-1)Cer); transglutaminase 5 (TGS5); high molecular weight-melanoma-associated antigen (HMWMAA); o-acetyl-GD2 ganglioside (OAcGD2); Folate receptor beta; tumor endothelial marker 1 (TEM1/CD248); tumor endothelial marker 7-related (TEM7R); claudin 6 (CLDN6); thyroid stimulating hormone receptor (TSHR); G protein-coupled receptor class C group 5, member D (GPRCSD); chromosome X open reading frame 61 (CXORF61); CD97; CD179a; anaplastic lymphoma kinase (ALK); Polysialic acid; placenta-specific 1 (PLAC1); hexasaccharide portion of globoH glycoceramide (GloboH); mammary gland differentiation antigen (NY-BR-1); uroplakin 2 (UPK2); Hepatitis A virus cellular receptor 1 (HAVCR1); adrenoceptor beta 3 (ADRB3); pannexin 3 (PANX3); G protein-coupled receptor 20 (GPR20); lymphocyte antigen 6 complex, locus K 9 (LY6K); Olfactory receptor 51E2 (OR51E2); TCR Gamma Alternate Reading Frame Protein (TARP); Wilms tumor protein (WT); Cancer/testis antigen 1 (NY-ESO-1); Cancer/testis antigen 2 (LAGE-1a); Melanoma-associated antigen 1 (MAGE-A1); ETS translocation-variant gene 6, located on chromosome 12p (ETV6-AML); sperm protein 17 (SPA 17); X Antigen Family, Member 1A (XAGE1); angiopoietin-binding cell surface receptor 2 (Tie 2); melanoma cancer testis antigen-1 (MAD-CT-1); melanoma cancer testis antigen-2 (MAD-CT-2); Fos-related antigen 1; tumor protein p53 (p53); p53 mutant; prostein; surviving; telomerase; prostate carcinoma tumor antigen-1 (PCTA-1 or Galectin 8), melanoma antigen recognized by T cells 1 (MelanA or MART1); Rat sarcoma (Ras) mutant; human Telomerase reverse transcriptase (hTERT); sarcoma translocation breakpoints; melanoma inhibitor of apoptosis (ML-IAP); ERG (transmembrane protease, serine 2 (TMPRSS2) ETS fusion gene); N-Acetyl glucosaminyl-transferase V (NA17); paired box protein Pax-3 (PAX3); Androgen receptor; Cyclin B1; v-myc avian myelocytomatosis viral oncogene neuroblastoma derived homolog (MYCN); Ras Homolog Family Member C (RhoC); Tyrosinase-related protein 2 (TRP-2); Cytochrome P450 1B1 (CYPB1); CCCTC-Binding Factor (Zinc Finger Protein)-Like (BORIS or Brother of the Regulator of Imprinted Sites), Squamous Cell Carcinoma Antigen Recognized By T Cells 3 (SART3); Paired box protein Pax-5 (PAX5); proacrosin binding protein sp32 (OY-TES1); lymphocyte-specific protein tyrosine kinase (LCK); A kinase anchor protein 4 (AKAP-4); synovial sarcoma, X breakpoint 2 (SSX2); Receptor for Advanced Glycation Endproducts (RAGE-1); renal ubiquitous 1 (RU1); renal ubiquitous 2 (RU2) legumain; human papilloma virus E6 (HPV E6); human papilloma virus E7 (HPV E7); intestinal carboxyl esterase: heat shock protein 70-2 mutated (mut hsp70-2); CD79a; CD79b; CD72; Leukocyte-associated immunoglobulin-like receptor 1 (LAIR1); Fc fragment of IgA receptor (FCAR or CD89); Leukocyte immunoglobulin-like receptor subfamily A member 2 (LILRA2); CD300 molecule-like family member f (CD300LF); C-type lectin domain family 12 member A (CLEC12A); bone marrow stromal cell antigen 2 (BST2); EGF-like module-containing mucin-like hormone receptor-like 2 (EMR2); lymphocyte antigen 75 (LY75); Glypican-3 (GPC3); Fc receptor-like 5 (FCRL5); and immunoglobulin lambda-like polypeptide 1 (IGLL1).

[0541] A CAR described herein can comprise an antigen binding domain (e.g., antibody or antibody fragment, TCR or TCR fragment) that binds to a tumor-supporting antigen (e.g., a tumor-supporting antigen as described herein). In some embodiments, the tumor-supporting antigen is an antigen present on a stromal cell or a myeloid-derived suppressor cell (MDSC). Stromal cells can secrete growth factors to promote cell division in the microenviromnent. MDSC cells can inhibit T cell proliferation and activation. Without wishing to be bound by theory, in some embodiments, the CAR-expressing cells destroy the tumor-supporting cells, thereby indirectly inhibiting tumor growth or survival.

[0542] In embodiments, the stromal cell antigen is chosen from one or more of: bone marrow stromal cell antigen 2 (BST2), fibroblast activation protein (FAP) and tenascin. In an embodiment, the FAP-specific antibody is, competes for binding with, or has the same CDRs as, sibrotuzumab. In embodiments, the MDSC antigen is chosen from one or more of: CD33, CD11b, C14, CD15, and CD66b. Accordingly, in some embodiments, the tumor-supporting antigen is chosen from one or more of: bone marrow stromal cell antigen 2 (BST2), fibroblast activation protein (FAP) or tenascin, CD33, CD11b, C14, CD15, and CD66b.

### Antigen-Binding Domain Structures

[0543] In some embodiments, the antigen binding domain of the encoded CAR molecule comprises an antibody, an antibody fragment, an scFv, a Fv, a Fab, a (Fab′)2, a single domain antibody (SDAB), a VH and/or VL domain, a camelid VHH domain, a bi-functional (e.g. bi-specific), or multispecific hybrid antibody (e.g., Lanzavecchia et al., Eur. J. Immunol. 17, 105 (1987)).

[0544] In some instances, scFvs can be prepared according to method known in the art (see, for example, Bird et al., (1988) Science 242:423426 and Huston et al., (1988) Proc. Natl. Acad. Sci. USA 85:5879-5883). ScFv molecules can be produced by linking VH and VL regions together using flexible polypeptide linkers. The scFv molecules can comprise a linker (e.g., a Ser-Gly linker) with an optimized length and/or amino acid composition. The linker length can greatly affect how the variable regions of a scFv fold and interact. In fact, if a short polypeptide linker is employed (e.g., between 5-10 amino acids) intrachain folding is prevented. Interchain folding is also required to bring the two variable regions together to form a functional epitope binding site. For examples of linker orientation and size see, e.g., Hollinger et al. 1993 Proc Natl Acad. Sci. U.S.A. 90:6444-6448, U.S. Patent Application Publication Nos. 2005/0100543, 2005/0175606, 2007/0014794, and PCT publication Nos. WO2006/020258 and WO2007024715, is incorporated herein by reference.

[0545] An scFv can comprise a linker of at least 1, 2, 3, 4, 5, 6, 7, 8, 9, 10, 11, 12, 13, 14, 15, 16, 17, 18, 19, 20, 25, 30, 35, 40, 45, 50, or more amino acid residues between its VL and VH regions. The linker sequence may comprise any naturally occurring amino acid. In some embodiments, the linker sequence comprises amino acids glycine and serine. In another embodiment, the linker sequence comprises sets of glycine and serine repeats such as (Gly₄Ser)n, where n is a positive integer equal to or greater than 1 (SEQ ID NO: 26). In one embodiment, the linker can be (Gly₄Sr)₄ (SEQ ID NO:34) or (Gly₄Ser)₃ (SEQ ID NO:35). Variation in the linker length may retain or enhance activity, giving rise to superior efficacy in activity studies.

[0546] In another aspect, the antigen binding domain is a T cell receptor (“TCR”), or a fragment thereof, for example, a single chain TCR (scTCR). Methods to make such TCRs are known in the art. See, e.g., Willemsen R A et al. Gene Therapy 7: 1369-1377 (2000); Zhang T et al. Cancer Gene Ther 11: 487-496 (2004); Aggen et al, Gene Ther. 19(4):365-74 (2012) (references are incorporated herein by its entirety). For example, scTCR can be engineered that contains the Vα and Vβ genes from a T cell clone linked by a linker (e.g., a flexible peptide). This approach is very useful to cancer associated target that itself is intracellular, however, a fragment of such antigen (peptide) is presented on the surface of the cancer cells by MHC.

[0547] In certain embodiments, the encoded antigen binding domain has a binding affinity KD of 10⁻⁴ M to 10⁻⁸ M.

[0548] In one embodiment, the encoded CAR molecule comprises an antigen binding domain that has a binding affinity KD of 10⁻⁴ M to 10⁻⁸ M, e.g., 10⁻⁵ M to 10⁻⁷ M, e.g., 10⁻⁶ M or 10⁻⁷ M, for the target antigen. In one embodiment, the antigen binding domain has a binding affinity that is at least five-fold, 10-fold, 20-fold, 30-fold, 50-fold, 100-fold or 1,000-fold less than a reference antibody, e.g., an antibody described herein. In one embodiment, the encoded antigen binding domain has a binding affinity at least 5-fold less than a reference antibody (e.g., an antibody from which the antigen binding domain is derived). In one aspect such antibody fragments are functional in that they provide a biological response that can include, but is not limited to, activation of an immune response, inhibition of signal-transduction origination from its target antigen, inhibition of kinase activity, and the like, as will be understood by a skilled artisan.

[0549] In one aspect, the antigen binding domain of the CAR is a scFv antibody fragment that is humanized compared to the murine sequence of the scFv from which it is derived.

[0550] In one aspect, the antigen binding domain of a CAR (e.g., a scFv) is encoded by a nucleic acid molecule whose sequence has been codon optimized for expression in a mammalian cell. In one aspect, entire CAR construct is encoded by a nucleic acid molecule whose entire sequence has been codon optimized for expression in a mammalian cell. Codon optimization refers to the discovery that the frequency of occurrence of synonymous codons (i.e., codons that code for the same amino acid) in coding DNA is biased in different species. Such codon degeneracy allows an identical polypeptide to be encoded by a variety of nucleotide sequences. A variety of codon optimization methods is known in the art, and include, e.g., methods disclosed in at least U.S. Pat. Nos. 5,786,464 and 6,114,148.

### Antigen-Binding Domains (and the Targeted Antigens)

[0551] In one embodiment, an antigen binding domain against CD19 is an antigen binding portion, e.g., CDRs, of a CAR, antibody or antigen-binding fragment thereof described in, e.g., PCT publication WO2012/079000; PCT publication WO2014/153270; Kochenderfer, J. N. et al., J. Immunother. 32 (7), 689-702 (2009); Kochenderfer, J. N., et al., Blood, 116 (20), 4099-4102 (2010); PCT publication WO2014/031687; Bejcek, Cancer Research, 55, 2346-2351, 1995; or U.S. Pat. No. 7,446,190.

[0552] In one embodiment, an antigen binding domain against mesothelin comprises an antigen binding portion, e.g., CDRs, of an antibody, antigen-binding fragment or CAR described in, e.g., PCT publication WO2015/090230. In one embodiment, an antigen binding domain against mesothelin comprises an antigen binding portion, e.g., CDRs, of an antibody, antigen-binding fragment, or CAR described in, e.g., PCT publication WO1997025068, WO1999/028471, WO005/014652, WO2006/099141, WO2009/045957, WO2009/068204, WO2013/142034, WO2013/040557, or WO2013/063419. In one embodiment, an antigen binding domain against mesothelin comprises an antigen binding portion, e.g., CDRs, of an antibody, antigen-binding fragment, or CAR described in WO/2015/090230.

[0553] In one embodiment, an antigen binding domain against CD123 comprises an antigen binding portion, e.g., CDRs, of an antibody, antigen-binding fragment or CAR described in, e.g., PCT publication WO2014/130635. In one embodiment, an antigen binding domain against CD123 comprises an antigen binding portion, e.g., CDRs, of an antibody, antigen-binding fragment, or CAR described in, e.g., PCT publication WO2014/138805, WO2014/138819, WO2013/173820, WO2014/144622, WO2001/66139, WO2010/126066, WO2014/144622, or US2009/0252742. In one embodiment, an antigen binding domain against CD123 comprises an antigen binding portion, e.g., CDRs, of an antibody, antigen-binding fragment, or CAR described in WO/2016/028896.

[0554] Examples include CAR molecules which include an antigen binding domain, or a VL and VH (in the sequences below, separated by a (G4S)3 linker (SEQ ID NO: 35)) of:

CD123-1:
(SEQ ID NO: 150)
QVQLVQSGAEVKKPGASVKVSCKASGYTFTGYYMHWVRQAPGQGLEWMGW
INPNSGGTNYAQKFQGRVTMTRDTSISTAYMELSRLRSDDTAVYYCARDM
NILATVPFDIWGQGTMVTVSSGGGGSGGGGSGGGGSDIQMTQSPSSLSAS
VGDRVTITCRASQSISTYLNWYQQKPGKAPNLLIYAAFSLQSGVPSRFSG
SGSGTDFTLTINSLQPEDFATYYCQQGDSVPLTFGGGTKLEIK;
CD123-2:
(SEQ ID NO: 151)
QVQLVQSGAEVKKPGASVKVSCKASGYTFTGYYMHWVRQAPGQGLEWMGW
INPNSGGTNYAQKFQGRVTLTRDTSISTVYMELSRLRSDDTAVYYCARDM
NILATVPFDIWGQGTMVTVSSGGGGSGGGGSGGGGSDIQMTQSPSSLSAS
VGDRVTITCRASQSISSYLNWYQQKPGKAPKLLIYAASSLQSGVPSRFSG
SGSGTDFTLTVNSLQPEDFATYYCQQGDSVPLTFGGGTRLEAK;
CD123-3:
(SEQ ID NO: 153)
QVQLVQSGAEVKKPGASVKVSCKASGYIFTGYYIHWVRQAPGQGLEWMGW
INPNSGGTNYAQKFQGRVTMTRDTSISTAYMELSGLRSDDPAVYYCARDM
NILATVPFDIWGQGTLVTVSSGGGGSGGGGSGGGGSDIQLTQSPSSLSAS
VGDRVTITCRASQSISSYLNWYQQKPGKAPKLLIYAASSLQSGVPSRFSG
SGSGTDFTLTVNSLQPEDFATYYCQQGDSVPLTFGGGTKVEIK;
OR
CD123-4:
(SEQ ID NO: 154)
QVQLQQSGAEVKKSGASVKVSCKASGYTFTDYYMHWLRQAPGQGLEWMGW
INPNSGDTNYAQKFQGRVTLTRDTSISTVYMELSRLRSDDTAVYYCARDM
NILATVPFDIWGQGTMVTVSSASGGGGSGGRASGGGGSDIQMTQSPSSLS
ASVGDRVTITCRASQSISSYLNWYQQKPGKAPKLLIYAASSLQSGVPSRF
SGSGSGTDFTLTISSLQPEDFATYYCQQGDSVPLTGGGTKVEIK,
from WO2016/0028896.

[0555] The CAR comprising said anti-CD123 binding domain may comprise, for example, the amino acid sequence of:

CAR123-2:
(SEQ ID NO: 155)
MALPVTALLLPLALLLHAARPQVQLVQSGAEVKKPGASVKVSCKASGYTF
TGYYMHWVRQAPGQGLEWMGWINPNSGGTNYAQKFQGRVTLTRDTSISTV
YMELSRLRSDDTAVYYCARDMNILATVPFDIWGQGTMVTVSSGGGGSGGG
GSGGGGSDIQMTQSPSSLSASVGDRSVTITCRASQSISSYLNWYQQKPGK
APKLLIYAASSLQSGVPSRFSGSGSGTDFTLTVNSLQPEDFATYYCQQGD
SVPLTFGGGTRLEIKTTTPAPRPPTPAPTIASQPLSLRPEACRPAAGGAV
HTRGLDFACDIYIWAPLAGTCGVLLLSLVITLYCKRGRKKLLYIFKQPFM
RPVQTTQEEDGCSCRFPEEEEGGCELRVKFSRSADAPAYKQGQNQLYNEL
NLGRREEYDVLDKRRGRDPEMGGKPRRKNPQEGLYNELQKDKMAEAYSEI
GIVIKGERRRGKGHDGLYQGLSTATKDTYDALHMQALPPR;
CAR123-3:
(SEQ ID NO: 156)
malpvtalllplalllhaarpqvglvqsgaevkkpgasvkvsckasgyif
tgyyihwvrqapgqglewmgwinpnsggtnyaqkfggrvtmtrdtsista
ymelsglrsddpavyycardmnilatvpfdiwgqgtlvtvssggggsggg
gsggggsdiqltqspsslsasvgdrvtitcrasqsissylnwyqqkpgka
pklliyaasslqsgvpsrfsgsgsgtdftltvnslgpedfatyycqqgds
vpltfgggtkveiktttpaprpptpaptiasqplslrpeacrpaaggavh
trgldfacdiyiwaplagtcgvlllslvitlyckrgrkkllyifkqpfmr
pvqttqeedgcscrfpeeeeggcelrvkfsrsadapaykqggnqlyneln
lgrreeydvldkrrgrdpemggkprrknpqeglynelqkdkmaeayseig
[sequence omitted];
car123-4:
(SEQ ID NO: 157)
malvtalllplalllhaarpqvglqqsgaevkksgasvkvsckasgytft
dyymhwlrqapgqglewmgwinpnsgdtnyaqkfqgrvtltrdtsistvy
melsrlrsddtavyycardmnilatvpfdiwgqgtmvtvssasggggsgg
rasggggsdiqmtqspsslsasvgdrvtitcrasqsissylnwyqqkpgk
apklliyaasslqsgvpsrfsgsgsgtdftltisslqpedfatyycqqgd
svpltfgggtkveiktttpaprpptpaptiasqplslrpeacrpaaggav
htrgldfacdiyiwaplagtcgvlllslvitlyck;
OR
CAR123-1:
(SEQ ID NO: 158)
malpvtalllplalllhaarpqvqlvqsgaevkkpgasvkvsckasgytf
tgyymhwvrqapgqglewmgwinpnsggtnyaqkfqgrvtmtrdtsista
ymelsrlrsddtavyycardmnilatvpfdiwgqgtmvtvssggggsggg
gsggggsdiqmtqspsslsasvgdrvtitcrasqsistylnwyqqkpgka
pnlliyaafslqsgvpsrfsgsgsgtdftltinslqpedfatyycqqgds
vpltfgggtkleiktttpaprpptpaptiasqplslrpeacrpaaggavh
trgldfacdiyiwaplagtcgvlllslvitlyckrgrkkllyifkqpfmr
pvqttqeedgcscrfpeeeeggcelrvkfsrsadapaykqgqnqtyneln
lgrreeydvldkrrgrdpemggkprrknpqeglynelqkdkmaeayseig
[sequence omitted]

[0556] In each case, the CAR may optionally comprise or not comprise the leader sequence included in each of the above sequences (MALPVTALLLPLALLLHAARP; SEQ ID NO: 2).

[0557] In one embodiment, an antigen binding domain against EGFRvIII comprises an antigen binding portion, e.g., CDRs, of an antibody, antigen-binding fragment or CAR described in, e.g., WO/2014/130657.

[0558] In one embodiment, an antigen binding domain against CD22 comprises an antigen binding portion, e.g., CDRs, of an antibody described in, e.g., Haso et al., Blood, 121(7): 1165-1174 (2013); Wayne et al., Clin Cancer Res 16(6): 1894-1903 (2010); Kato et al., Leuk Res 37(1):83-88 (2013); Creative BioMart (creativebiomart.net): MOM-18047-S(P). In one embodiment, an antigen binding domain against CD22 comprises an antigen binding portion, e.g., CDRs, of an antibody, antigen-binding fragment, or CAR described in WO2016/164731.

[0559] In one embodiment, an antigen binding domain against CS-1 comprises an antigen binding portion, e.g., CDRs, of Elotuzumab (BMS), see e.g., Tai et al., 2008, Blood 112(4):1329-37; Tai et al., 2007, Blood, 10(5):1656-63.

[0560] In one embodiment, an antigen binding domain against CLL-1 comprises an antigen binding portion, e.g., CDRs, of an antibody available from R&D, ebiosciences, Abcam, for example, PE-CLL1-hu Cat #353604 (BioLegend); and PE-CLL1 (CLEC12A) Cat #562566 (BD). In one embodiment, an antigen binding domain against CLL-1 comprises an antigen binding portion, e.g., CDRs, of an antibody, antigen-binding fragment, or CAR described in WO/2016/014535.

[0561] In one embodiment, an antigen binding domain against CD33 comprises an antigen binding portion, e.g., CDRs, of an antibody described in, e.g., Bross et al., Clin Cancer Res 7(6):1490-1496 (2001) (Gemtuzumab Ozogamicin, hP67.6), Caron et al., Cancer Res 52(24):6761-6767 (1992) (Lintuzumab, HuM195), Lapusan et al., Invest New Drugs 30(3):1121-1131 (2012) (AVE9633), Aigner et al., Leukemia 27(5): 1107-1115 (2013) (AMG330, CD33 BiTE), Dutour et al., Adv hematol 2012:683065 (2012), and Pizzitola et al., Leukemia doi:10.1038/Lue.2014.62 (2014). In one embodiment, an antigen binding domain against CD33 comprises an antigen binding portion, e.g., CDRs, of an antibody, antigen-binding fragment, or CAR described in WO/2016/014576.

[0562] In one embodiment, an antigen binding domain against GD2 comprises an antigen binding portion, e.g., CDRs, of an antibody described in, e.g., Mujoo et al., Cancer Res. 47(4):1098-1104 (1987); Cheung et al., Cancer Res 45(6):2642-2649 (1985), Cheung et al., J Clin Oncol 5(9):1430-1440 (1987), Cheung et al., J Clin Oncol 16(9):3053-3060 (1998), Handgretinger et al., Cancer Immunol Immunother 35(3):199-204 (1992). In some embodiments, an antigen binding domain against GD2 comprises an antigen binding portion of an antibody selected from mAb 14.18, 14G2a, ch14.18, hu14.18, 3F8, hu3F8, 3G6, 8B6, 60C3, 10B8, ME36.1, and 8H9, see e.g., WO2012033885, WO2013040371, WO2013192294, WO2013061273, WO2013123061, WO2013074916, and WO201385552. In some embodiments, an antigen binding domain against GD2 comprises an antigen binding portion of an antibody described in US Publication No.: 20100150910 or PCT Publication No.: WO 2011160119.

[0563] In one embodiment, an antigen binding domain against BCMA comprises an antigen binding portion, e.g., CDRs, of an antibody described in, e.g., WO2012163805, WO2001/12812, and WO2003/062401. In one embodiment, an antigen binding domain against BCMA comprises an antigen binding portion, e.g., CDRs, of an antibody, antigen-binding fragment, or CAR described in WO/2016/014565.

[0564] In one embodiment, an antigen binding domain against Tn antigen comprises an antigen binding portion, e.g., CDRs, of an antibody described in, e.g., U.S. Pat. No. 8,440,798, Brooks et al., PNAS 107(22):10056-10061 (2010), and Stone et al., Oncommunology 1(6):863-873(2012).

[0565] In one embodiment, an antigen binding domain against PSMA comprises an antigen binding portion, e.g., CDRs, of an antibody described in, e.g., Parker et al., Protein Expr Purif 89(2):136-145 (2013), US 20110268656 (J591 ScFv); Frigerio et al. European J Cancer 49(9):2223-2232 (2013) (scFvD2B); WO 2006125481 (mAbs 3/A12, 3/E7 and 3/F11) and single chain antibody fragments (scFv A5 and D7).

[0566] In one embodiment, an antigen binding domain against ROR1 comprises an antigen binding portion, e.g., CDRs, of an antibody described in, e.g., Hudecek et al., Clin Cancer Res 19(12):3153-3164 (2013); WO 2011159847; and US20130101607.

[0567] In one embodiment, an antigen binding domain against FLT3 comprises an antigen binding portion, e.g., CDRs, of an antibody described in, e.g., WO2011076922, U.S. Pat. No. 5,777,084, EP0754230, US20090297529, and several commercial catalog antibodies (R&D, ebiosciences, Abcam).

[0568] In one embodiment, an antigen binding domain against TAG72 comprises an antigen binding portion, e.g., CDRs, of an antibody described in, e.g., Hombach et al., Gastroenterology 113(4):1163-1170 (1997); and Abcam ab691.

[0569] In one embodiment, an antigen binding domain against FAP comprises an antigen binding portion, e.g., CDRs, of an antibody described in, e.g., Ostermann et al., Clinical Cancer Research 14:4584-4592 (2008) (FAP5), US Pat. Publication No. 2009/0304718; sibrotuzumab (see e.g., Hofheinz et al., Oncology Research and Treatment 26(1), 2003); and Tran et al., J Exp Med 210(6):1125-1135 (2013).

[0570] In one embodiment, an antigen binding domain against CD38 comprises an antigen binding portion, e.g., CDRs, of daratumumab (see, e.g., Groen et al., Blood 116(21):1261-1262 (2010); MOR202 (see, e.g., U.S. Pat. No. 8,263,746); or antibodies described in U.S. Pat. No. 8,362,211.

[0571] In one embodiment, an antigen binding domain against CD44v6 comprises an antigen binding portion, e.g., CDRs, of an antibody described in, e.g., Casucci et al., Blood 122(20):3461-3472 (2013).

[0572] In one embodiment, an antigen binding domain against CEA comprises an antigen binding portion, e.g., CDRs, of an antibody described in, e.g., Chmielewski et al., Gastoenterology 143(4):1095-1107 (2012).

[0573] In one embodiment, an antigen binding domain against EPCAM comprises an antigen binding portion, e.g., CDRS, of an antibody selected from MT110, EpCAM-CD3 bispecific Ab (see, e.g., clinicaltrials.gov/ct2/show/NCT00635596); Edrecolomab; 3622W94; ING-1; and adecatumumab (MT201).

[0574] In one embodiment, an antigen binding domain against PRSS21 comprises an antigen binding portion, e.g., CDRs, of an antibody described in U.S. Pat. No. 8,080,650.

[0575] In one embodiment, an antigen binding domain against B7H3 comprises an antigen binding portion, e.g., CDRs, of an antibody MGA271 (Macrogenics).

[0576] In one embodiment, an antigen binding domain against KIT comprises an antigen binding portion, e.g., CDRs, of an antibody described in, e.g., U.S. Pat. No. 7,915,391, US20120288506, and several commercial catalog antibodies.

[0577] In one embodiment, an antigen binding domain against IL-13Ra2 comprises an antigen binding portion, e.g., CDRs, of an antibody described in, e.g., WO2008/146911, WO2004087758, several commercial catalog antibodies, and WO2004087758.

[0578] In one embodiment, an antigen binding domain against CD30 comprises an antigen binding portion, e.g., CDRs, of an antibody described in, e.g., U.S. Pat. No. 7,090,843 B1, and EP0805871.

[0579] In one embodiment, an antigen binding domain against GD3 comprises an antigen binding portion, e.g., CDRs, of an antibody described in, e.g., U.S. Pat. Nos. 7,253,263; 8,207,308; US 20120276046; EP1013761; WO2005035577; and U.S. Pat. No. 6,437,098.

[0580] In one embodiment, an antigen binding domain against CD171 comprises an antigen binding portion, e.g., CDRs, of an antibody described in, e.g., Hong et al., J Immunother 37(2):93-104 (2014).

[0581] In one embodiment, an antigen binding domain against IL-11Ra comprises an antigen binding portion, e.g., CDRs, of an antibody available from Abcam (cat #ab55262) or Novus Biologicals (cat #EPR5446). In another embodiment, an antigen binding domain again IL-11Ra comprises a peptide, see, e.g., Huang et al., Cancer Res 72(1):271-281 (2012).

[0582] In one embodiment, an antigen binding domain against PSCA comprises an antigen binding portion, e.g., CDRs, of an antibody described in, e.g., Morgenroth et al., Prostate 67(10):1121-1131 (2007) (scFv 7F5); Nejatollahi et al., J of Oncology 2013(2013), article ID 839831 (scFv C5-11); and US Pat Publication No. 20090311181.

[0583] In one embodiment, an antigen binding domain against VEGFR2 comprises an antigen binding portion, e.g., CDRs, of an antibody described in, e.g., Chinnasamy et al., J Clin Invest 120(11):3953-3968 (2010).

[0584] In one embodiment, an antigen binding domain against LewisY comprises an antigen binding portion, e.g., CDRs, of an antibody described in, e.g., Kelly et al., Cancer Biother Radiopharm 23(4):411-423 (2008) (hu3S193 Ab (scFvs)); Dolezal et al., Protein Engineering 16(1):47-56 (2003) (NC10 scFv).

[0585] In one embodiment, an antigen binding domain against CD24 comprises an antigen binding portion, e.g., CDRs, of an antibody described in, e.g., Maliar et al., Gastroenterology 143(5):1375-1384 (2012).

[0586] In one embodiment, an antigen binding domain against PDGFR-beta comprises an antigen binding portion, e.g., CDRs, of an antibody Abcam ab32570.

[0587] In one embodiment, an antigen binding domain against SSEA-4 comprises an antigen binding portion, e.g., CDRs, of antibody MC813 (Cell Signaling), or other commercially available antibodies.

[0588] In one embodiment, an antigen binding domain against CD20 comprises an antigen binding portion, e.g., CDRs, of the antibody Rituximab, Ofatumumab, Ocrelizumab, Veltuzumab, or GA101. In one embodiment, an antigen binding domain against CD20 comprises an antigen binding portion, e.g., CDRs, of an antibody, antigen-binding fragment, or CAR described in WO2016/164731.

[0589] In one embodiment, an antigen binding domain against Folate receptor alpha comprises an antigen binding portion, e.g., CDRs, of the antibody IMGN853, or an antibody described in US20120009181; U.S. Pat. No. 4,851,332, LK26; U.S. Pat. No. 5,952,484.

[0590] In one embodiment, an antigen binding domain against ERBB2 (Her2/neu) comprises an antigen binding portion, e.g., CDRs, of the antibody trastuzumab, or pertuzumab.

[0591] In one embodiment, an antigen binding domain against MUC1 comprises an antigen binding portion, e.g., CDRs, of the antibody SAR566658.

[0592] In one embodiment, the antigen binding domain against EGFR comprises antigen binding portion, e.g., CDRs, of the antibody cetuximab, panitumumab, zalutumumab, nimotuzumab, or matuzumab.

[0593] In one embodiment, an antigen binding domain against NCAM comprises an antigen binding portion, e.g., CDRs, of the antibody clone 2-2B: MAB5324 (EMD Millipore).

[0594] In one embodiment, an antigen binding domain against Ephrin B2 comprises an antigen binding portion, e.g., CDRs, of an antibody described in, e.g., Abengozar et al., Blood 119(19):4565-4576 (2012).

[0595] In one embodiment, an antigen binding domain against IGF-I receptor comprises an antigen binding portion, e.g., CDRs, of an antibody described in, e.g., U.S. Pat. No. 8,344,112 B2; EP2322550 A1: WO 2006/138315, or PCT/US2006/022995.

[0596] In one embodiment, an antigen binding domain against CAIX comprises an antigen binding portion, e.g., CDRs, of the antibody clone 303123 (R&D Systems).

[0597] In one embodiment, an antigen binding domain against LMP2 comprises an antigen binding portion, e.g., CDRs, of an antibody described in, e.g., U.S. Pat. No. 7,410,640, or US20050129701.

[0598] In one embodiment, an antigen binding domain against gp100 comprises an antigen binding portion, e.g., CDRs, of the antibody HMB45, NKIbetaB, or an antibody described in WO2013165940, or US20130295007

[0599] In one embodiment, an antigen binding domain against tyrosinase comprises an antigen binding portion, e.g., CDRs, of an antibody described in, e.g., U.S. Pat. No. 5,843,674; or US19950504048.

[0600] In one embodiment, an antigen binding domain against EphA2 comprises an antigen binding portion, e.g., CDRs, of an antibody described in, e.g., Yu et al., Mol Ther 22(1):102-111 (2014).

[0601] In one embodiment, an antigen binding domain against GD3 comprises an antigen binding portion, e.g., CDRs, of an antibody described in, e.g., U.S. Pat. Nos. 7,253,263; 8,207,308; US 20120276046; EP1013761 A3; 20120276046; WO2005035577; or U.S. Pat. No. 6,437,098.

[0602] In one embodiment, an antigen binding domain against fucosyl GM1 comprises an antigen binding portion, e.g., CDRs, of an antibody described in, e.g., US20100297138; or WO2007/067992.

[0603] In one embodiment, an antigen binding domain against sLe comprises an antigen binding portion, e.g., CDRs, of the antibody G193 (for lewis Y), see Scott A M et al, Cancer Res 60: 3254-61 (2000), also as described in Neeson et al. J Immunol May 2013 190 (Meeting Abstract Supplement) 177.10.

[0604] In one embodiment, an antigen binding domain against GM3 comprises an antigen binding portion, e.g., CDRs, of the antibody CA 2523449 (mAb 14F7).

[0605] In one embodiment, an antigen binding domain against HMWMAA comprises an antigen binding portion, e.g., CDRs, of an antibody described in, e.g., Kmiecik et al., Oncoimmunology 3(1):e27185 (2014) (PMID: 24575382) (mAb9.2.27); U.S. Pat. No. 6,528,481; WO2010033866; or US 20140004124.

[0606] In one embodiment, an antigen binding domain against o-acetyl-GD2 comprises an antigen binding portion, e.g., CDRs, of the antibody 8B6.

[0607] In one embodiment, an antigen binding domain against TEM1/CD248 comprises an antigen binding portion, e.g., CDRs, of an antibody described in, e.g., Marty et al., Cancer Lett 235(2):298-308 (2006); Zhao et al., J Immunol Methods 363(2):221-232 (2011).

[0608] In one embodiment, an antigen binding domain against CLDN6 comprises an antigen binding portion, e.g., CDRs, of the antibody IMAB027 (Ganymed Pharmaceuticals), see e.g., clinicaltrial.gov/show/NCT02054351.

[0609] In one embodiment, an antigen binding domain against TSHR comprises an antigen binding portion, e.g., CDRs, of an antibody described in, e.g., U.S. Pat. No. 8,603,466; 8,501,415; or 8,309,693.

[0610] In one embodiment, an antigen binding domain against GPRC5D comprises an antigen binding portion, e.g., CDRs, of the antibody FAB6300A (R&D Systems); or LS-A4180 (Lifespan Biosciences).

[0611] In one embodiment, an antigen binding domain against CD97 comprises an antigen binding portion, e.g., CDRs, of an antibody described in, e.g., U.S. Pat. No. 6,846,911; de Groot et al., J Immunol 183(6):4127-4134 (2009); or an antibody from R&D:MAB3734.

[0612] In one embodiment, an antigen binding domain against ALK comprises an antigen binding portion, e.g., CDRs, of an antibody described in, e.g., Mino-Kenudson et al., Clin Cancer Res 16(5):1561-1571 (2010).

[0613] In one embodiment, an antigen binding domain against polysialic acid comprises an antigen binding portion, e.g., CDRs, of an antibody described in, e.g., Nagae et al., J Biol Chem 288(47):33784-33796 (2013).

[0614] In one embodiment, an antigen binding domain against PLAC1 comprises an antigen binding portion, e.g., CDRs, of an antibody described in, e.g., Ghods et al., Biotechnol Appl Biochem 2013 doi:10.1002/bab.1177.

[0615] In one embodiment, an antigen binding domain against GloboH comprises an antigen binding portion of the antibody VK9; or an antibody described in, e.g., Kudryashov V et al, Glycoconj J. 15(3):243-9 (1998), Lou et al., Proc Natl Acad Sci USA 111(7):2482-2487 (2014); MBr1: Bremer E-G et al. J Biol Chem 259:14773-14777 (1984).

[0616] In one embodiment, an antigen binding domain against NY-BR-1 comprises an antigen binding portion, e.g., CDRs of an antibody described in, e.g., Jager et al., Appl Immunohistochem Mol Morphol 15(1):77-83 (2007).

[0617] In one embodiment, an antigen binding domain against WT-1 comprises an antigen binding portion, e.g., CDRs, of an antibody described in, e.g., Dao et al., Sci Transl Med 5(176):176ra33 (2013); or WO2012/135854.

[0618] In one embodiment, an antigen binding domain against MAGE-A1 comprises an antigen binding portion, e.g., CDRs, of an antibody described in, e.g., Willemsen et al., J Immunol 174(12):7853-7858 (2005) (TCR-like scFv).

[0619] In one embodiment, an antigen binding domain against sperm protein 17 comprises an antigen binding portion, e.g., CDRs, of an antibody described in, e.g., Song et al., Target Oncol 2013 Aug. 14 (PMID: 23943313); Song et al., Med Oncol 29(4):2923-2931 (2012).

[0620] In one embodiment, an antigen binding domain against Tie 2 comprises an antigen binding portion, e.g., CDRs, of the antibody AB33 (Cell Signaling Technology).

[0621] In one embodiment, an antigen binding domain against MAD-CT-2 comprises an antigen binding portion, e.g., CDRs, of an antibody described in, e.g., PMID: 2450952; U.S. Pat. No. 7,635,753.

[0622] In one embodiment, an antigen binding domain against Fos-related antigen 1 comprises an antigen binding portion, e.g., CDRs, of the antibody 12F9 (Novus Biologicals).

[0623] In one embodiment, an antigen binding domain against MelanA/MART1 comprises an antigen binding portion, e.g., CDRs, of an antibody described in, EP2514766 A2; or U.S. Pat. No. 7,749,719.

[0624] In one embodiment, an antigen binding domain against sarcoma translocation breakpoints comprises an antigen binding portion, e.g., CDRs, of an antibody described in, e.g., Luo et al. EMBO Mol. Med. 4(6):453-461 (2012).

[0625] In one embodiment, an antigen binding domain against TRP-2 comprises an antigen binding portion, e.g., CDRs, of an antibody described in, e.g., Wang et al, J Exp Med. 184(6):2207-16 (1996).

[0626] In one embodiment, an antigen binding domain against CYP1B1 comprises an antigen binding portion, e.g., CDRs, of an antibody described in, e.g., Maecker et al, Blood 102 (9): 3287-3294 (2003).

[0627] In one embodiment, an antigen binding domain against RAGE-1 comprises an antigen binding portion, e.g., CDRs, of the antibody MAB5328 (EMD Millipore).

[0628] In one embodiment, an antigen binding domain against human telomerase reverse transcriptase comprises an antigen binding portion, e.g., CDRs, of the antibody cat no: LS-B95-100 (Lifespan Biosciences)

[0629] In one embodiment, an antigen binding domain against intestinal carboxyl esterase comprises an antigen binding portion, e.g., CDRs, of the antibody 4F12: cat no: LS-B6190-50 (Lifespan Biosciences).

[0630] In one embodiment, an antigen binding domain against mut hsp70-2 comprises an antigen binding portion, e.g., CDRs, of the antibody Lifespan Biosciences: monoclonal: cat no: LS-C133261-100 (Lifespan Biosciences).

[0631] In one embodiment, an antigen binding domain against CD79a comprises an antigen binding portion, e.g., CDRs, of the antibody Anti-CD79a antibody [HM47/A9] (ab3121), available from Abcam; antibody CD79A Antibody #3351 available from Cell Signalling Technology; or antibody HPA017748-Anti-CD79A antibody produced in rabbit, available from Sigma Aldrich.

[0632] In one embodiment, an antigen binding domain against CD79b comprises an antigen binding portion, e.g., CDRs, of the antibody polatuzumab vedotin, anti-CD79b described in Dornan et al., “Therapeutic potential of an anti-CD79b antibody-drug conjugate, anti-CD79b-vc-MMAE, for the treatment of non-Hodgkin lymphoma” Blood. 2009 Sep. 24; 114(13):2721-9, doi: 10.1182/blood-2009-02-205500. Epub 2009 Jul. 24, or the bispecific antibody Anti-CD79b/CD3 described in “4507 Pre-Clinical Characterization of T Cell-Dependent Bispecific Antibody Anti-CD79b/CD3 As a Potential Therapy for B Cell Malignancies” Abstracts of 56^{th} ASH Annual Meeting and Exposition, San Francisco, Calif. Dec. 6-9, 2014.

[0633] In one embodiment, an antigen binding domain against CD72 comprises an antigen binding portion, e.g., CDRs, of the antibody J3-109 described in Myers, and Uckun, “An anti-CD72 immunotoxin against therapy-refractory B-lineage acute lymphoblastic leukemia.” Leuk Lymphoma. 1995 June; 18(1-2):119-22, or anti-CD72 (10D6.8.1, mIgG1) described in Polson et al., “Antibody-Drug Conjugates for the Treatment of Non-Hodgkin's Lymphoma: Target and Linker-Drug Selection” Cancer Res Mar. 15, 2009 69; 2358.

[0634] In one embodiment, an antigen binding domain against LAIR1 comprises an antigen binding portion, e.g., CDRs, of the antibody ANT-301 LAIR1 antibody, available from ProSpec; or anti-human CD305 (LAIR1) Antibody, available from BioLegend.

[0635] In one embodiment, an antigen binding domain against FCAR comprises an antigen binding portion, e.g., CDRs, of the antibody CD89/FCAR antibody (Catalog #10414-H08H), available from Sino Biological Inc.

[0636] In one embodiment, an antigen binding domain against LILRA2 comprises an antigen binding portion, e.g., CDRs, of the antibody LILRA2 monoclonal antibody (M17), clone 3C7, available from Abnova, or Mouse Anti-LILRA2 antibody, Monoclonal (2D7), available from Lifespan Biosciences.

[0637] In one embodiment, an antigen binding domain against CD300LF comprises an antigen binding portion, e.g., CDRs, of the antibody Mouse Anti-CMRF35-like molecule 1 antibody, Monoclonal [UP-D2, available from BioLegend, or Rat Anti-CMRF35-like molecule 1 antibody, Monoclonal [234903], available from R&D Systems.

[0638] In one embodiment, an antigen binding domain against CLEC12A comprises an antigen binding portion, e.g., CDRs, of the antibody Bispecific T cell Engager (BiTE) scFv-antibody and ADC described in Noordhuis et al., “Targeting of CLEC12A In Acute Myeloid Leukemia by Antibody-Drug-Conjugates and Bispecific CLL-1×CD3 BiTE Antibody” 53^{rd} ASH Annual Meeting and Exposition, Dec. 10-13, 2011, and MCLA-117 (Merus).

[0639] In one embodiment, an antigen binding domain against BST2 (also called CD317) comprises an antigen binding portion, e.g., CDRs, of the antibody Mouse Anti-CD317 antibody, Monoclonal [3H4], available from Antibodies-Online or Mouse Anti-CD317 antibody. Monoclonal [696739], available from R&D Systems.

[0640] In one embodiment, an antigen binding domain against EMR2 (also called CD312) comprises an antigen binding portion, e.g., CDRs, of the antibody Mouse Anti-CD312 antibody, Monoclonal [LS-B8033] available from Lifespan Biosciences, or Mouse Anti-CD312 antibody, Monoclonal [494025] available from R&D Systems.

[0641] In one embodiment, an antigen binding domain against LY75 comprises an antigen binding portion, e.g., CDRs, of the antibody Mouse Anti-Lymphocyte antigen 75 antibody, Monoclonal [HD30] available from EMD Millipore or Mouse Anti-Lymphocyte antigen 75 antibody. Monoclonal [A15797] available from Life Technologies.

[0642] In one embodiment, an antigen binding domain against GPC3 comprises an antigen binding portion, e.g., CDRs, of the antibody hGC33 described in Nakano K, Ishiguro T, Konishi H, et al. Generation of a humanized anti-glypican 3 antibody by CDR grafting and stability optimization. Anticancer Drugs. 2010 November; 21(10):907-916, or MDX-1414, HN3, or YP7, all three of which are described in Feng et al., “Glypican-3 antibodies: a new therapeutic target for liver cancer.” FEBS Lett. 2014 Jan. 21; 588(2):377-82.

[0643] In one embodiment, an antigen binding domain against FCRL5 comprises an antigen binding portion, e.g., CDRs, of the anti-FcRL5 antibody described in Elkins et al., “FcRL5 as a target of antibody-drug conjugates for the treatment of multiple myeloma” Mol Cancer Ther. 2012 October; 11(10):2222-32. In one embodiment, an antigen binding domain against FCRL5 comprises an antigen binding portion, e.g., CDRs, of the anti-FcRL5 antibody described in, for example, WO2001/038490, WO/2005/117986, WO2006/039238, WO2006/076691, WO2010/114940, WO2010/120561, or WO2014/210064.

[0644] In one embodiment, an antigen binding domain against IGLL1 comprises an antigen binding portion, e.g., CDRs, of the Mouse Anti-Immunoglobulin lambda-like polypeptide 1 antibody. Monoclonal [AT1G4] available from Lifespan Biosciences, Mouse Anti-Immunoglobulin lambda-like polypeptide 1 antibody, Monoclonal [HSL11] available from BioLegend.

[0645] In one embodiment, the antigen binding domain comprises one, two, or three (e.g., all three) heavy chain CDRs, HC CDR1, HC CDR2 and HC CDR3, from an antibody listed above, and/or one, two, or three (e.g., all three) light chain CDRs, LC CDR1, LC CDR2 and LC CDR3, from an antibody listed above. In one embodiment, the antigen binding domain comprises a heavy chain variable region and/or a variable light chain region of an antibody listed above. In some embodiments aspect, the CAR comprises an antigen-binding domain and an Fc region as described herein.

[0646] In another aspect, the antigen binding domain comprises a humanized antibody or an antibody fragment. In some aspects, a non-human antibody is humanized, where specific sequences or regions of the antibody are modified to increase similarity to an antibody naturally produced in a human or fragment thereof. In one aspect, the antigen binding domain is humanized. In some embodiments, a non-human antibody or fragment is humanized and back-mutated to bring the antigen binding affinity of the humanized antibody closer to that of the original non-human antibody or fragment.

[0647] In an embodiment, the antigen-binding domain of a CAR, e.g., a CAR expressed by a cell, binds to CD19. CD19 is found on B cells throughout differentiation of the lineage from the pro/pre-B cell stage through the terminally differentiated plasma cell stage. In an embodiment, the antigen binding domain comprises a murine scFv domain that binds to human CD19, e.g., the antigen binding domain of CTL019 (e.g., SEQ ID NO: 160). In an embodiment, the antigen binding domain comprises a humanized antibody or antibody fragment, e.g., an scFv domain, derived from the murine CTL019 scFv. In an embodiment, the antigen binding domain is a human antibody or antibody fragment that binds to human CD19. Exemplary scFv domains (and their sequences, e.g., CDRs, VL and VH sequences) that bind to CD19 are provided in Table 4. The scFv domain sequences provided in Table 4 include alight chain variable region (VL) and a heavy chain variable region (VH). The VL and VH are attached by a linker comprising the sequence GGGGSGGGGSGGGGS (SEQ ID NO: 35), e.g., in the following orientation: VL-linker-VH.

TABLE 4
Antigen Binding domains that bind CD19

| | | | SEQ |
|---|---|---|---|
| Antigen | Name | Amino Acid Sequence | ID NO: |
| CD19 | muCTL019 | DIQMTQTTSSLSASLGDRVTISCRASQDISKYLNWYQUPDGTVKLLI | 160 |
| | | YHTSRLHSGVPSRFSGSGSGTDYSLTISNLEQEDIATYFCQQGNTLPY | |
| | | TFGGGTKLEITGGGGSGGGGSGGGGSEVKLQESGPGLVAPSQSLSVTC | |
| | | TVSGVSLPDYGVSWIRQPPRKGLEWLGVIWGSETTYYNSALKSRLTII | |
| | | KDNSKSQVFLKMNSLQTDDTAIYYCAKHYYYGGSYAMDYWGQGTSVTV | |
| | | SS | |
| CD19 | huscFv1 | EIVMTQSPATLSLSPGERATLSCRASQDISKYLNWYQQKPGQAPRLLI | 161 |
| | | YHTSRLHSGIPARFSGSGSGTDYTLTISSLQPEDFAVYFCQQGNTLPY | |
| | | TFGQGTKLEIKGGGGSGGGGSGGGGSQVQLQESGPGLVKPSETLSLTC | |
| | | TVSGVSLPDYGVSWIRQPPGKGLEWIGVIWGSETTYYSSSLKSRVTIS | |
| | | KDNSKNQVSLKLSSVTAADTAVYYCAKHYYYGGSYAMDYWGQGTLVTV | |
| | | SS | |
| CD19 | huscFv2 | EIVMTQSPATLSLSPGERATLSCRASQDISKYLNWYQQAPRLLI | 162 |
| | | YHTSRLHSGIPARFSGSGSGTDYTLTISSLQPEDFAVYFCQQGNTLPY | |
| | | TFGQGTKLEIKGGGGSGGGGSGGGGSQVQLQESGPGLVKPSETLSLTC | |
| | | TVSGVSLPDYGVSWIRQPPGKGLEWIGVIWGSETTYYQSSLKSRVTIS | |
| | | KDNSKNQVSLKLSSVTAADTAVYYCAKHYYYGGSYAMDYWGQGTLVTV | |
| | | SS | |
| CD19 | huscFv3 | QVQLQESGPGLVKPSETLSLTCTVSGVSLPDYGVSWIRQPPGKGLEWI | 163 |
| | | GVIWGSETTYYSSSLKSRVTISKDNSKNQVSLKLSSVTAADTAVYYCA | |
| | | KHYYYGGSYAMDYWGQGTLVTVSSGGGGSGGGGSGGGGSEIVMTQSPA | |
| | | TLSLSPGERATLSCRASQDISKYLNWYQQKPGQAPRLLIYHTSRLHSG | |
| | | IPARFSGSGSGTDYTLTISSLQPEDFAVYFCQQGNTLPYTFGQGTKLE | |
| | | IK | |
| CD19 | huscFv4 | QVQLQESGPGLVKPSETLSLTCTVSGVSLPDYGVSWIRQPPGKGLEWI | 164 |
| | | GVIWGSETTYYQSSLKSRVTISKDNSKNQVSLKLSSVTAADTAVYYCA | |
| | | KHYYYGGSYAMDYWGQGTLVTVSSGGGGSGGGGSGGGGSEIVMTQSPA | |
| | | TLSLSPGERATLSCRASQDISKYLNWYQQKPGQAPRLLIYHTSRLHSG | |
| | | IPARFSGSGSGTDYTLTISSLQPEDFAVYFCQQGNTLPYTFGQGTKLE | |
| | | IK | |
| CD19 | huscFv5 | EIVMTQSPATLSLSPGERATLSCRASQDISKYLNWYQQKPGQAPRLLI | 165 |
| | | YHTSRLHSGIPARFSGSGSGTDYTLTISSLQPEDFAVYFCQQGNTLPY | |
| | | TFGQGTKLEIKGGGGSGGGGSGGGGSGGGGSQVQLQESGPGLVKPSET | |
| | | LSLTCTVSGVSLPDYGVSWIRQPPGKGLEWIGVIWGSETTYYSSSLKS | |
| | | RVTISKDNSKNQVSLKLSSVTAADTAVYYCAKHYYYGGSYAMDYWGQG | |
| | | TLVTVSS | |
| CD19 | huscFv6 | EINTMTQSPATLSLSPGERATLSCRASQDISKYLNWYQQKPGQAPRLLI | 166 |
| | | YHTSRLHSGIPARFSGSGSGTDYTLTISSLQPEDFAVYFCQQGNTLPY | |
| | | TFGQGTKLEIKGGGGSGGGGSGGGGSGGGGSQVQLQESGPGLVKPSET | |
| | | LSLTCTVSGVSLPDYGVSWIRQPPGKGLEWIGVIWGSETTYYQSSLKS | |
| | | RVTISKDNSKNQVSLKLSSVTAADTAVYYCAKHYYYGGSYAMDYWGQG | |
| | | TLVTVSS | |
| CD19 | huscFv7 | QVQLQESGPGLVKPSETLSLTCTVSGVSLPDYGVSWIRQPPGKGLEWI | 167 |
| | | GVIWGSETTYYSSSLKSRVTISKDNSKNQVSLKLSSVTAADTAVYYCA | |
| | | KHYYYGGSYAMDYWGQGTLVTVSSGGGGSGGGGSGGGGSGGGGSEIVM | |
| | | TQSPATLSLSPGERATLSCRASQDISKYLNWYQQKPGQAPRLLIYHTS | |
| | | RLHSGIPARFSGSGSGTDYTLTISSLQPEDFAVYFCQQGNTLPYTFGQ | |
| | | GTKLEIK | |
| CD19 | huscFv8 | QVQLQESGPGLVKPSETLSLTCTVSGVSLPDYGVSWIRQPPGKGLEWI | 168 |
| | | GVIWGSETTYYQSSLKSRVTISKDNSKNQVSLKLSSVTAADTAVYYCA | |
| | | KHYYYGGSYAMDYWGQGTLVTVSSGGGGSGGGGSGGGGSGGGGSEIVM | |
| | | TQSPATLSLSPGERATLSCRASQDISKYLNWYQQKPGQAPRLLIYHTS | |
| | | PLHSGIPARFSGSGSGTDYTLTISSLQPEDFAVYFCQQGNTLPYTFGQ | |
| | | GTKLEIK | |
| CD19 | huscFv9 | EIVMTQSPATLSLSPGERATLSCRASQDISKYLNWYQQKPGQAPRLLI | 169 |
| | | YHTSRLHSGIPARFSGSGSGTDYTLTISSLQPEDFAVYFCQQGNTLPY | |
| | | TFGQGTKLEIKGGGGSGGGGSGGGGSGGGGSQVQLQESGPGLVKPSET | |
| | | LSLTCTVSGVSLPDYGVSWIRQPPGKGLEWIGVIWGSETTYYNSSLKS | |
| | | RVTISKDNSKNQVSLKLSSVTAADTAVYYCAKHYYYGGSYAMDYWGQG | |
| | | TLVTVSS | |
| CD19 | HuscFv10 | QVQLQESGPGLVKPSETLSLTCTVSGVSLPDYGVSWIRQPPGKGLEWI | 170 |
| | | GVIWGSETTYYNSSLKSRVTISKDNSKNQVSLKLSSVTAADTAVYYCA | |
| | | KHYYYGGSYAMDYWGQGTLVTVSSGGGGSGGGGSGGGGSGGGGSEIVM | |
| | | TQSPATLSLSPGERATLSCRASQDISKYLNWYQQKPGQAPRLLIYHTS | |
| | | RLHSGIPARFSGSGSGTDYTLTISSLQPEDFAVYFCQQGNTLPYTFGQ | |
| | | GTKLEIK | |
| CD19 | HuscFv11 | EIVMTQSPATLSLSPGERATLSCRASQDISKYLNWYQQKPGQAPRLLI | 171 |
| | | YHTSRLHSGIPARFSGSGSGTDYTLTISSLQPEDFAVYFCQQGNTLPY | |
| | | TFGQGTKLEIKGGGGSGGGGSGGGGSQVQLQESGPGLVKPSETLSLTC | |
| | | TVSGVSLPDYGVSWIRQPPGKGLEWIGVIWGSETTYYNSSLKSRVTIS | |
| | | KDNSKNQVSLKLSSVTAADTAVYYCAKHYYYGGSYAMDYWGQGTLVTV | |
| | | SS | |
| CD19 | HuscFv12 | QVQLQESGPGLVKPSETLSLTCTVSGVSLPDYGVSWIRQPPGKGLEWI | 172 |
| | | GVIWGSETTYYNSSLKSPVTISKDNSKNQVSLKLSSVTAADTAVYYCA | |
| | | KHYYYGGSYAMDYWGQGTLVTVSSGGGGSGGGGSGGGGSEIVMTQSPA | |
| | | TLSLSPGERATLSCRASODISKYLNWYQQKPGQAPRLLIYHTSRLHSG | |
| | | IPARFSGSGSGTDYTLTISSLQPEDFAVYFCQQGNTLPYTFGQGTKLE | |
| | | IK | |

[0648] The sequences of the CDR sequences of the scFv domains of the CD19 antigen binding domains provided in Table 4 are shown in Table 5 for the heavy chain variable domains and in Table 6 for the light chain variable domains. “ID” stands for the respective SEQ ID NO for each CDR.

TABLE 5
Heavy Chain Variable Domain CDRs

| Description | FW | HCDR1 | ID | HCDR2 | ID | HCDR3 | ID |
|---|---|---|---|---|---|---|---|
| murine_CART19 | | GVSLPDYGVS | 176 | VIWGSETTYYNSALKS | 177 | HYYYGGSYAMDY | 181 |
| humanized_CART19 a | VH4 | GVSLPDYGVS | 176 | VIWGSETTYY [symbol] S [symbol] LKS | 178 | HYYYGGSYAMDY | 181 |
| humanized_CART19 b | VH4 | GVSLPDYGVS | 176 | VIWGSETTYY [symbol] S [symbol] LKS | 179 | HYYYGGSYAMDY | 181 |
| humanized_CARTI9 c | VH4 | GVSLPDYGVS | 176 | VIWGSETTYYNS [symbol] LKS | 180 | HYYYGGSYAMDY | 181 |

TABLE 6
Light Chain Variable Domain CDRs

| Description | FW | LCDR1 | ID | LCDR2 | ID | LCDR3 | ID |
|---|---|---|---|---|---|---|---|
| murine_CART19 | | RASQDISKYLN | 182 | HTSRLHS | 183 | QQGNTLPYT | 184 |
| humanized_CART19 a | VK3 | RASQDISKYLN | 182 | HTSRLHS | 183 | QQGNTLPYT | 184 |
| humanized_CART19 b | VK3 | RASQDISKYLN | 182 | HTSRLHS | 183 | QQGNTLPYT | 184 |
| humanized_CART19 c | VK3 | RASQDISKYLN | 182 | HTSRLHS | 183 | QQGNTLPYT | 184 |

[0649] In an embodiment, the antigen binding domain comprises an anti-CD19 antibody, or fragment thereof, e.g., an scFv. For example, the antigen binding domain comprises a variable heavy chain and/or a variable light chain listed in Table 7. The linker sequence joining the variable heavy and variable light chains can be any of the linker sequences described herein, or alternatively, can be GSTSGSGKPGSGEGSTKG (SEQ ID NO: 38). The light chain variable region and heavy chain variable region of a scFv can be, e.g., in any of the following orientations: light chain variable region-linker-heavy chain variable region or heavy chain variable region-linker-light chain variable region.

TABLE 7
Additional Anti-CD19 antibody binding domains

| Ab Name | VH Sequence | VL Sequence |
|---|---|---|
| SJ25-C1 | QVQLLESGAELVRPGSSVKISCKASG | ELVLTQSPKFMSTSVGDRVSVTCKASQNV |
| | YAFSSYWMNWVKQRPGQGLEWIGQIY | GTNVAWYQQKPGQSPKPLIYSATYRNSGV |
| | PGDGDTNYNGKFKGQATLTADKSSST | PDRFTGSGSGTDFTLTITNVQSKDLADYF |
| | AYMQLSGLTSEDSAVYSCARKTISSV | YFCQYNRYPYTSGGGTKLEIKRRS (SEQ |
| | VDFYFDYWGQGTTVT (SEQ ID | ID NO: 174) |
| | NO: 173) | |

| | |
|---|---|
| | ScFv Sequence |
| SJ25-C1 | QVQLLESGAELVRPGSSVKISCKASGYAFSSYWMNWVKQRPGQGLEWIGQIYPGDGD |
| scFv | TNYNGKFKGQATLTADKSSSTAYMQLSGLTSEDSAVYSCARKTISSVVDFYFDYWGQ |
| | GTTVTGSTSGSGKPGSGEGSTKGELVLTQSPKFMSTSVGDRVSVTCKASQNVGTNVA |
| | WYQQPGQSPKPLIYSATYRNSGVPDRFTGSGSGTDFTLTITNVQSKDLADYFYFCQ |
| | YNRYPYTSGGGTKLEIKRRS (SEQ ID NO: 175) |

[0650] In one embodiment, the CD19 binding domain comprises one or more (e.g., all three) light chain complementary determining region 1 (LC CDR), light chain complementary determining region 2 (LC CDR2), and light chain complementary determining region 3 (LC CDR3) of a CD19 binding domain described herein, e.g., provided in Table 4 or 6, and/or one or more (e.g., all three) heavy chain complementary determining region 1 (HC CDR1), heavy chain complementary determining region 2 (HC CDR2), and heavy chain complementary determining region 3 (HC CDR3) of a CD19 binding domain described herein, e.g., provided in Table 4 or 5. In one embodiment, the CD19 binding domain comprises one, two, or all of LC CDR1, LC CDR2, and LC CDR3 of any amino acid sequences as provided in Table 6, incorporated herein by reference; and one, two or all of HC CDR1, HC CDR2, and HC CDR3 of any amino acid sequences as provided in Table 5.

[0651] In one embodiment, the CD19 antigen binding domain comprises:
[0652] (a) a LC CDR1 amino acid sequence of SEQ ID NO: 182, a LC CDR2 amino acid sequence of SEQ ID NO: 183, and a LC CDR3 amino acid sequence of SEQ ID NO: 184; and
[0653] (b) a HC CDR1 amino acid sequence of SEQ ID NO: 176, a HC CDR2 amino acid sequence of SEQ ID NO: 177, and a HC CDR3 amino acid sequence of SEQ ID NO: 181
[0654] (a) a LC CDR1 amino acid sequence of SEQ ID NO: 182, a LC CDR2 amino acid sequence of SEQ ID NO: 183, and a LC CDR3 amino acid sequence of SEQ ID NO: 184; and
[0655] (b) a HC CDR1 amino acid sequence of SEQ ID NO: 176, a HC CDR2 amino acid sequence of SEQ ID NO: 178, and a HC CDR3 amino acid sequence of SEQ ID NO: 181;
[0656] (a) a LC CDR1 amino acid sequence of SEQ ID NO: 182, a LC CDR2 amino acid sequence of SEQ ID NO: 183, and a LC CDR3 amino acid sequence of SEQ ID NO: 184; and
[0657] (b) a HC CDR1 amino acid sequence of SEQ ID NO: 176, a HC CDR2 amino acid sequence of SEQ ID NO: 179, and a HC CDR3 amino acid sequence of SEQ ID NO: 181; or
[0658] (a) a LC CDR1 amino acid sequence of SEQ ID NO: 182, a LC CDR2 amino acid sequence of SEQ ID NO: 183, and a LC CDR3 amino acid sequence of SEQ ID NO: 184; and
[0659] a HC CDR1 amino acid sequence of SEQ ID NO: 176, a HC CDR2 amino acid sequence of SEQ ID NO: 180, and a HC CDR3 amino acid sequence of SEQ ID NO: 181.

[0660] In one embodiment, the CD19 binding domain comprises a light chain variable region described herein (e.g., in Table 4 or 7) and/or a heavy chain variable region described herein (e.g., in Table 4 or 7). In one embodiment, the CD19 binding domain is a scFv comprising a light chain and a heavy chain of an amino acid sequence listed in Table 4 or 7. In an embodiment, the CD19 binding domain (e.g., an scFv) comprises: a light chain variable region comprising an amino acid sequence having at least one, two or three modifications (e.g., substitutions, e.g., conservative substitutions) but not more than 30, 20 or 10 modifications (e.g., substitutions, e.g., conservative substitutions) of an amino acid sequence of a light chain variable region provided in Table 4 or 7, or a sequence with 95-99% identity with an amino acid sequence provided in Table 4 or 7; and/or a heavy chain variable region comprising an amino acid sequence having at least one, two or three modifications (e.g., substitutions, e.g., conservative substitutions) but not more than 30, 20 or 10 modifications (e.g., substitutions, e.g., conservative substitutions) of an amino acid sequence of a heavy chain variable region provided in Table 4 or 7, or a sequence with 95-99% identity to an amino acid sequence provided in Table 4 or 7.

[0661] In one embodiment, the CD19 binding domain comprises an amino acid sequence selected from a group consisting of SEQ ID NO: 161; SEQ ID NO: 162, SEQ ID NO: 163; SEQ ID NO: 164; SEQ ID NO: 165; SEQ ID NO: 166; SEQ ID NO: 167, SEQ ID NO: 168, SEQ ID NO: 169, SEQ ID NO: 170, SEQ ID NO: 171, SEQ ID NO: 172, SEQ ID NO: 160, and SEQ ID NO: 175; or an amino acid sequence having at least one, two or three modifications (e.g., substitutions, e.g., conservative substitutions) but not more than 30, 20 or 10 modifications (e.g., substitutions, e.g., conservative substitutions) to any of the aforesaid sequences; or a sequence with 95-99% identity to any of the aforesaid sequences. In one embodiment, the CD19 binding domain is a scFv, and a light chain variable region comprising an amino acid sequence described herein, e.g., in Table 4 or 7, is attached to a heavy chain variable region comprising an amino acid sequence described herein, e.g., in Table 4 or 7, via a linker, e.g., a linker described herein. In one embodiment, the CD19 binding domain includes a (Gly4-Ser)n linker, wherein n is 1, 2, 3, 4, 5, or 6, preferably 3 (SEQ ID NO: 1872). The light chain variable region and heavy chain variable region of a scFv can be, e.g., in any of the following orientations: light chain variable region-linker-heavy chain variable region or heavy chain variable region-linker-light chain variable region.

[0662] Any known CD19 CAR e.g., the CD19 antigen binding domain of any known CD19 CAR, in the art can be used in accordance with the instant disclosure to construct a CAR. For example, LG-740; CD19 CAR described in the U.S. Pat. Nos. 8,399,645; 7,446,190; Xu et al., Leuk Lymphoma. 2013 54(2):255-260(2012); Cruz et al., Blood 122(17):2965-2973 (2013); Brentjens et al., Blood, 118(18):4817-4828 (2011); Kochenderfer et al., Blood 116(20):4099-102 (2010); Kochenderfer et al., Blood 122 (25):4129-39(2013); and 16th Annu Meet Am Soc Gen Cell Ther (ASGCT) (May 15-18, Salt Lake City) 2013, Abst 10. In one embodiment, an antigen binding domain against CD19 comprises an antigen binding portion, e.g., the CDRs, of a CAR, antibody or antigen-binding fragment thereof described in, e.g., PCT publication WO2012/079000; PCT publication WO2014/153270; Kochenderfer, J. N. et al., J. Immunother. 32 (7). 689-702 (200)); Kochenderfer, J. N., et al., Blood, 116 (20), 40994102 (2010); PCT publication WO2014/031687; Bejcek, Cancer Research, 55, 2346-2351, 1995; or U.S. Pat. No. 7,446,190.

[0663] In an embodiment, the antigen-binding domain of a CAR, e.g., a CAR expressed by a cell, binds to BCMA. BCMA is found preferentially expressed in mature B lymphocytes. In an embodiment, the antigen binding domain is a murine scFv domain that binds to human BCMA. In an embodiment, the antigen binding domain is a humanized antibody or antibody fragment, e.g., scFv domain, that binds human BCMA. In an embodiment, the antigen binding domain is a humanized and back-mutated antibody or antibody fragment, e.g., scFv domain, that binds human BCMA In an embodiment, the antigen binding domain is a human antibody or antibody fragment that binds to human BCMA. Exemplary scFv domains (and their sequences, e.g., CDRs, VL and VH sequences) that bind to BCMA are provided in Table 8, Table 9, Table 10 and Table 11. The scFv domain sequences provided in Table 8 and Table 9 include a light chain variable region (VL) and a heavy chain variable region (VH). The VL and VH are attached by a linker, e.g., in the following orientation: VH-linker-VL.

TABLE 8
Antigen Binding domains that bind BCMA
The amino acid sequences of variable heavy chain and variable
light chain sequences for each scFv are also provided.

| | | |
|---|---|---|
| Name/ | SEQ | |
| Description | ID NO: | Sequence |

139109

| | | |
|---|---|---|
| 139109-aa | 249 | EVQLVESGGGLVQPGGSLRLSCAVSGFALSNHGMSWVRRAPGKGLEWVSG |
| ScFv domain | | IVYSGSTYYAASVKGRFTISRDNSRNTLYLQMNSLRPEDTAIYYCSAHGG |
| | | ESDVWGQGTTVTVSSASGGGGSGGRASGGGGSDIQLTQSPSSLSASVGDR |
| | | VTITCRASQSISSYLKWYQQKPGKAPKLLIYAASSLQSGVPSRFSGSGSG |
| | | TDFTLTISSLQPEDFATYYCQQSYSTPYTFGQGTKVEIK |
| 139109-nt | 264 | GAAGTGCAATTGGTGGAATCAGGGGGAGGACTTGTGCAGCCTGGAGGATC |
| ScFv domain | | GCTGAGACTGTCATGTGCCGTGTCCGGCTTTGCCCTGTCCAACCACGGGA |
| | | TGTCCTGGGTCCGCCGCGCGCCTGGAAAGGGCCTCGAATGGGTGTCGGGT |
| | | ATTGTGTACAGCGGTAGCACCTACTATGCCGCATCCGTGAAGGGGAGATT |
| | | CACCATCAGCCGGGACAACTCCAGGAACACTCTGTACCTCCAAATGAATT |
| | | CGCTGAGGCCAGAGGACACTGCCATCTACTACTGCTCCGCGCATGGCGGA |
| | | GAGTCCGACGTCTGGGGACAGGGGACCACCGTGACCGTGTCTAGCGCGTC |
| | | CGGCGGAGGCGGCAGCGGGGGTCGGGCATCAGGGGGCGGCGGATCGGACA |
| | | TCCAGCTCACCCAGTCCCCGAGCTCGCTGTCCGCCTCCGTGGGAGATCGG |
| | | GTCACCATCACGTGCCGCGCCAGCCAGTCGATTTCCTCCTACCTGAACTG |
| | | GTACCAACAGAAGCCCGGAAAAGCCCCGAAGCTTCTCATCTACGCCGCCT |
| | | CGAGCCTGCAGTCAGGAGTGCCCTCACGGTTCTCCGGCTCCCCTTCCGGT |
| | | ACTGATTTCACCCTGACCATTTCCTCCCTGCAACCGGAGGACTTCGCTAC |
| | | TTACTACTGCCAGCAGTCGTACTCCACCCCCTACACTTTCGGACAAGGCA |
| | | CCAAGGTCGAAATCAAG |
| 139109-aa | 279 | EVQLVESGGGLVQPGGSLRLSCAVSGFALSNHGMSWVRRAPGKGLEWVSG |
| VH | | IVYSGSTYYAASVKGRFTISRDNSRNTLYLQMNSLRPEDTAIYYCSAHGG |
| | | ESDVWGQGTTVTVSS |
| 139109-aa | 294 | DIQLTQSPSSLSASVGDRVTITCRASQSISSYLKWYQQKPGKAPKLLIYA |
| VL | | ASSLQSGVPSRFSGSGSGTDFTLTISSLQPEDFATYYCQQSYSTPYTFGQ |
| | | GTKVEIK |

139103

| | | |
|---|---|---|
| 139103-aa | 239 | QVQLVESGGGLVQPGRSLRLSCAASGFTGSNYAMSWVRQAPGKGLGWVSG |
| ScFv domain | | ISRSGENTYYADSVKGRFTISRDNSKNTLYLQMNSLRDEDTAVYYCARSP |
| | | AHYYGGMDVWGQGTTVTVSSASGGGGSGGRASGGGGSDIVLTQSPGTLSL |
| | | SPGERATLSCRASQSISSSFLAWYQQKPGQAPRLLIYGASRRATGIPDRF |
| | | SGSGSGTDFTLTISRLEPEDSAVYYCQQYHSSPSWTFGQGTKLEIK |
| 139103-nt | 254 | CAAGTGCAACTCGTGGAATCTGGTGGAGGACTCGTGCAACCCGGAAGATC |
| ScFv domain | | GCTTAGACTGTCGTGTGCCGCCAGCGGGTTCACTTTCTCGAACTACGCGA |
| | | TGTCCTGGGTCCGCCAGGCACCCGGAAAGGGACTCGGTTGGGTGTCCGGC |
| | | ATTTCCCGGTCCGGCGAAAATACCTACTACGCCGACTCCGTGAAGGGCCG |
| | | CTTCACCATCTCAAGGGACAACAGCAAAAACACCCTGTACTTGCAAATGA |
| | | ACTCCCTGCGGGATGAAGATACAGCCGTGTACTATTGCGCCCGGTCGCCT |
| | | GCCCATTACTACGGCGGAATGGACGTCTGGGGACAGGGAACCACTGTGAC |
| | | TGTCAGCAGCGCGTCGGGTGGCGGCGGCTCAGGGGGTCGGGCCTCCGGGG |
| | | GGGGAGGGTCCGACATCGTGCTGACCCAGTCCCCGGGAACCCTGAGCCTG |
| | | AGCCCGGGAGAGCGCGCGACCCTGTCATGCCGCGCATCCCAGAGCATTAG |
| | | CTCCTCCTTTCTCGCCTGGTATCAGCAGAAGCCCGGACAGGCCCCGAGGC |
| | | TGCTGATCTACGGCGCTAGCAGAAGGGCTACCGGAATCCCAGACCGGTTC |
| | | TCCGGCTCCGGTTCCGGGACCGATTTCACCCTTACTATCTCGCGCCTGGA |
| | | ACCTGAGGACTCCGCCGTCTACTACTGCCAGCAGTACCACTCATCCCCGT |
| | | CGTGGACGTTCGGACAGGGCACCAAGCTGGAGATTAAG |
| 139103-aa | 269 | QVQLVESGGGLNQPGRSLRLSCAASGFTFSNYAMSWVRQAPGKGLGWVSG |
| VH | | ISRSGENTYYADSVKGRFTISRDNSKNTLYLQMNSLRDEDTAVYYCARSP |
| | | AHYYGGMDVWGQGTTVTVSS |
| 139103-aa | 284 | DIVLTQSPGTLSLSPGERATLSCRASQSISSSFLAWYQQKPGQAPRLLIY |
| VL | | GASRRATGIPDRFSGSGSGTDFTLTISRLEPEDSAVYYCQQYHSSPSWTF |
| | | GQGTKLEIK |

139105

| | | |
|---|---|---|
| 139105-aa | 240 | QVQLVESGGGLVQPGRSLRLSCAASGFTFDDYAMHWVRQAPGKGLEWVSG |
| ScFv domain | | ISWNSGSIGYADSVKGRFTISRDNAKNSLYLQMNSLRAEDTALYYCSVHS |
| | | FLAYWGQGTLVTVSSASGGGGSGGRASGGGGSDIVMTQTPLSLPVTPGEP |
| | | ASISCRSSQSLLHSNGYNYLDWYLQKPGQSPQLLIYLGSNRASGVPDRFS |
| | | GSGSGTDFTLKISRVEAEDVGVYYCMQALQTPYTFGQGTKVEIK |
| 139105-nt | 255 | CAAGTGCAACTCGTCGAATCCGGTGGAGGTCTGGTCCAACCTGGTAGAAG |
| ScFv domain | | CCTGAGACTGTCGTGTGCGGCCAGCGGATTCACCTTTGATGACTATGCTA |
| | | TGCACTGGGTGCGGCAGGCCCCAGGAAAGGGCCTGGAATGGGTGTCGGGA |
| | | ATTAGCTGGAACTCCGGGTCCATTGGCTACGCCGACTCCGTGAAGGGCCG |
| | | CTTCACCATCTCCCGCGACAACGCAAAGAACTCCCTGTACTTGCAAATGA |
| | | ACTCGCTCAGGGCTGAGGATACCGCGCTGTACTACTGCTCCGTGCATTCC |
| | | TTCCTGGCCTACTGGGGACAGGGAACTCTGGTCACCGTGTCGAGCGCCTC |
| | | CGGCGGCGGGGGCTCGGGTGGACGGGCCTCGGGCGGAGGGGGGTCCGACA |
| | | TCGTGATGACCCAGACCCCGCTGAGCTTGCCCGTGACTCCCGGAGAGCCT |
| | | GCATCCATCTCCTGCCGGTCATCCCAGTCCCTTCTCCACTCCAACGGATA |
| | | CAACTACCTCGACTGGTACCTCCAGAAGCCGGGACAGAGCCCTCAGCTTC |
| | | TGATCTACCTGGGGTCAAATAGAGCCTCAGGAGTGCCGGATCGGTTCAGC |
| | | GGATCTGGTTCGGGAACTGATTTCACTCTGAAGATTTCCCGCGTGGAAGC |
| | | CGAGGACGTGGGCGTCTACTACTGTATGCAGGCGCTGCAGACCCCCTATA |
| | | CCTTCGGCCAAGGGACGAGTGGAGATCAAG |
| 139105-aa | 270 | QVQLVESGGGLVQPGRSLRLSCAASGFTFDDYAMHWVRQAPGKGLEWVSG |
| VH | | ISWSGSIGYADSVKGRFTISRDNAKNSLYLQMNSLRAEDTALYYCSVHS |
| | | FLAYWGQGTLVTVSS |
| 139105-aa | 285 | DIVMTQTPLSLPVTPGEPASISCRSSLLHSNGYNYLDWYLQKPGQSPQ |
| VL | | LLIYLGSNRASGVPDRFSGSGSGTDFTLKISRVEAEDVGVYYCMQALQTP |
| | | YTFGQGTKVEIK |

139111

| | | |
|---|---|---|
| 139111-aa | 241 | EVQLLESGGGLVQPGGSLRLSCAVSGFALSNHGMSWVRRAPGNGLEWVSG |
| ScFv domain | | IVYSGSTYYAASVKGRFTISRDNSRNTLYLQMNSLRPEDTAIYYCSAHGG |
| | | ESDVWGQGTTVTVSSASGGGGSGGRASGGGGSDIVMTQTPLSLSVTPGQP |
| | | ASISCKSSQSLLRNDGKTPLYWYLQKAGQPPQLLIYEVSNRFSGVPDRFS |
| | | GSGSGTDFTLKISRVEAEDVGAYYCMQNIQFPSFGGGTKLEIK |
| 139111-nt | 256 | GAAGTGCAATTGTTGGAATCTGGAGGAGGACTTGTGCAGCCTGGAGGATC |
| ScFv domain | | ACTGAGACTTTCGTGTGCGGTGTCAGGCTTCGCCCTGAGCAACCACGGCA |
| | | TGAGCTGGGTGCGGAGAGCCCCGGGGAAGGGTCTGGAATGGGTGTCCGGG |
| | | ATCGTCTACTCCGGTTCAACTTACTACGCCGCAAGCGTGAAGGGTCGCTT |
| | | CACCATTTCCCGCGATAACTCCCGGAACACCCTGTACCTCCAAATGAACT |
| | | CCCTGCGGCCCGAGGACACCGCCATCTACTACTGTTCCGCGCATGGAGGA |
| | | GAGTCCGATGTCTGGGGACAGGGCACTACCGTGACCGTGTCGAGCGCCTC |
| | | GGGGGGAGGAGGCTCCGGCGGTCGCGCCTCCGGGGGGGGTGGCAGCGACA |
| | | TTGTGATGACGCAGACTCCACTCTCGCTGTCCGTGACCCCGGGACAGCCC |
| | | GCGTCCATCTCGTGCAAGAGCTCCCAGAGCCTGCTGAGGAACGACGGAAA |
| | | GACTCCTCTGTATTGGTACCTCCAGAAGGCTGGACAGCCCCCGCAACTGC |
| | | TCATCTACGAAGTGTCAAATCGCTTCTCCGGGGTGCCGGATCGGTTTTCC |
| | | GGCTCGGGATCGGGCACCGACTTCACCCTGAAAATCTCCAGGGTCGAGGC |
| | | CGAGGACGTGGGAGCCTACTACTGCATGCAAAACATCCAGTTCCCTTCCT |
| | | TCGGCGGCGGCACAAAGCTGGAGATTAAG |
| 139111-aa | 271 | EVQLLESGGGLVQPGGSLRLSCAVSGFALSNHGMSWVRRAPGKGLEWVSG |
| VH | | IVYSGSTYYAASVKGRFTISRDNSRNTLYLQMNSLRPEDTAIYYCSAHGG |
| | | ESDVWGQGTTVTVSS |
| 139111-aa | 286 | DIVMTQTPLSLSVTPGQPASISCKSSQSLLRNDGKTPLYWYLQKAGQPPQ |
| VL | | LLIYEVSNRFSGVPDRFSGSGSGTDFTLKISRVEAEDVGAYYCMQNIQFP |
| | | SFGGGTKLEIK |

139100

| | | |
|---|---|---|
| 139100-aa | 242 | QVQLVQSGAEVRKTGASVKVSCKASGYIFDNFGINWVRQAPGQGLEWMGW |
| ScFv domain | | INPKNNNTNYAQKFQGRVTITADESTNTAYMEVSSLRSEDTAVYYCARGP |
| | | YYQSYNDVWGQGTMVTVSSASGGGGSGGRASGGGGSDIVMTQTPLSLPV |
| | | TPGEPASISCRSSQSLLHSNGYNYLNWYLQKPGQSPQLLIYLGSKRASGV |
| | | PDRFSGSGSGTDFTLHITRVGAEDVGVYYCMQALQTPYTFGQGTKLEIK |
| 139100-nt | 257 | CAAGTCCAACTCGTCCAGTCCGGCGCAGAAGTCAGAAAAACCGGTGCTAG |
| ScFv domain | | CGTGAAAGTGTCCTGCAAGGCCTCCGGCTACATTTTCGATAACTTCGGAA |
| | | TCAACTGGGTCAGACAGGCCCCGGGCCAGGGGCTGGAATGGATGGGATGG |
| | | ATCAACCCCAAGAACAACAACACCAACTACGCACAGAAGTTCCAGGGCCG |
| | | CGTGACTATCACCGCCGATGAATCGACCAATACCGCCTACATGGAGGTGT |
| | | CCTCCCTGCGGTCGGAGGACACTGCCGTGTATTACTGCGCGAGGGGCCCA |
| | | TACTACTACCAAAGCTACATGGACGTCTGGGGACAGGGAACCATGGTGAC |
| | | CGTGTCATCCGCCTCCGGTGGTGGAGGCTCCGGGGGGCGGGCTTCAGGAG |
| | | GCGGAGGAAGCGATATTGTGATGACCCAGACTCCGCTTAGCCTGCCCGTG |
| | | ACTCCTGGAGAACCGGCCTCCATTTCCTGCCGGTCCTCGCAATCACTCCT |
| | | GCATTCCAACGGTTACAACTACCTGAATTGGTACCTCCAGAAGCCTGGCC |
| | | AGTCGCCCCAGTTGCTGATCTATCTGGGCTCGAAGCGCGCCTCCGGGGTG |
| | | CCTGACCGGTTTAGCGGATCTGGGAGCGGCACGGACTTCACTCTCCACAT |
| | | CACCCGCGTGGGAGCGGAGGACGTGGGAGTGTACTACTGTATGCAGGCGC |
| | | TGCAGACTCCGTACACATTCGGACAGGGCACCAAGCTGGAGATCAAG |
| 139100-aa | 272 | QVQLVQSGAEVRKTGASVKVSCKASGYIFDNFGINWVRQAPGQGLEWMGW |
| VH | | INPKNNNTNYAQKFQGRVTITADESTNTAYMEVSSLRSEDTAVYYCARGP |
| | | YYYQSYMDVWGQGTMVTVSS |
| 139100-aa | 287 | DIVMTQTPLSLPVTPGEPASISCRSSQSLLHSNGYNYLNWYLQKPGQSPQ |
| VL | | LLIYLGSKRASGVPDRFSGSGSGTDFTLHITRVGAEDVGVYYCMQALQTP |
| | | YTFGQGTKLEIK |

139101

| | | |
|---|---|---|
| 139101-aa | 243 | QVQLQESGGGLVQPGGSLRLSCAASGFTFSSDAMTWVRQAPGKGLEWVSV |
| ScFv domain | | ISGSGGTTYYADSVKGRFTISRDNSKNTLYLQMNSLRAEDTAVYYCAKLD |
| | | SSGYYYARGPRYWGQGTLVTVSSASGGGGSGGRASGGGGSDIQLTQSPSS |
| | | LSASVGDRVTITCRASQSISSYLNWYQQKPGKAPKLLIYGASTLASGVPA |
| | | RFSGSGSGTHFTLTINSLQSEDSATYYCQQSYKRASFGQGTKVEIK |
| 139101-nt | 258 | CAAGTGCAACTTCAAGAATCAGGCGGAGGACTCGTGCAGCCCGGAGGATC |
| ScFv domain | | ATTGCGGCTCTCGTGCGCCGCCTCGGGCTTCACCTTCTCGAGCGACGCCA |
| | | TGACCTGGGTCCGCCAGGCCCCGGGGAAGGGGCTGGAATGGGTGTCTGTG |
| | | ATTTCCGGCTCCGGGGGAACTACGTACTACGCCGATTCCGTGAAAGGTCG |
| | | CTTCACTATCTCCCGGGACAACAGCAAGAACACCCTTTATCTGCAAATGA |
| | | ATTCCCTCCGCGCCGAGGACACCGCCGTGTACTACTGCGCCAAGCTGGAC |
| | | TCCTCGGGCTACTACTATGCCCGGGGTCCGAGATACTGGGGACAGGGAAC |
| | | CCTCGTGACCGTGTCCTCCGCGTCCGGCGGAGGAGGGTCGGGAGGGCGGG |
| | | CCTCCGGCGGCGGCGGTTCGGACATCCAGCTGACCCAGTCCCCATCCTCA |
| | | CTGAGCGCAAGCGTGGGCGACAGAGTCACCATTACATGCAGGGCGTCCCA |
| | | GAGCATCAGCTCCTACCTGAACTGGTACCAACAGAAGCCTGGAAAGGCTC |
| | | CTAAGCTGTTGATCTACGGGGCTTCGACCCTGGCATCCGGGGTGCCCGCG |
| | | AGGTTTAGCGGAAGCGGTAGCGGCACTCACTTCACTCTGACCATTAACAG |
| | | CCTCCAGTCCGAGGATTCAGCCACTTACTACTGTCAGCAGTCCTACAAGC |
| | | GGGCCAGCTTCGGACAGGGCACTAAGGTCGAGATCAAG |
| 139101-aa | 273 | QVQLQESGGGLVQPGGSLRESCAASGETFSSDAMTWVRQAPGKGLEWVSV |
| VH | | ISGSGGTTYYADSVKGRFTISRDNSKNTLYLQMNSERAEDTAVYYCAKLD |
| | | SSGYYYARGPRYWGQGTLVTVSS |
| 139101-aa | 288 | DIQLTQSPSSLSASVGDRVTITCRASQSISSYLNWYQQKPGKAPKLLIYG |
| VL | | ASTLASGVPARFSGSGSGTHFTLTINSEQSEDSATYYCQQSYKRASFGQG |
| | | TKVEIK |

139102

| | | |
|---|---|---|
| 139102-aa | 244 | QVQLVQSGAEVKKPGASVKVSCKASGYTFSNYGITWVRQAPGQGLEWMGW |
| ScFv domain | | ISAYNGNTNYAQKFQGRVTMTRNTSISTAYMELSSLRSEDTAVYYCARGP |
| | | YYYYMDVWGNGTMVTVSSASGGGGSGGRASGGGGSEIVMTQSPLSLPVTP |
| | | GEPASISCRSSQLLYSNGYNYVDWYLQKPGQSPQLLIYLGSNRASGVPD |
| | | RFSGSGSGTDFKLQISRVEAEDVGIYYCMQGRQFPYSFGQGTKVEIK |
| 139102-nt | 259 | CAAGTCCAACTGGTCCAGAGCGGTGCAGAAGTGAAGAAGCCCGGAGCGAG |
| ScFv domain | | CGTGAAAGTGTCCTGCAAGGCTTCCGGGTACACCTTCTCCAACTACGGCA |
| | | TCACTTGGGTGCGCCAGGCCCCGGGACAGGGCCTGGAATGGATGGGGTGG |
| | | ATTTCCGCGTACAACGGCAATACGAACTACGCTCAGAAGTTCCAGGGTAG |
| | | AGTGACCATGACTAGGAACACCTCCATTTCCACCGCCTACATGGAACTGT |
| | | CCTCCCTGCGGAGCGAGGACACCGCCGTGTACTATTGCGCCCGGGGACCA |
| | | TACTACTACTACATGGATGTCTGGGGGAAGGGGACTATGGTCACCGTGTC |
| | | ATCCGCCTCGGGAGGCGGCGGATCAGGAGGACGCGCCTCTGGTGGTGGAG |
| | | GATCGGAGATCGTGATGACCCAGAGCCCTCTCTCCTTGCCCGTGACTCCT |
| | | GGGGAGCCCGCATCCATTTCATGCCGGAGCTCCCAGTCACTTCTCTACTC |
| | | CAACGGCTATAACTACGTGGATTGGTACCTCCAAAAGCCGGGCCAGAGCC |
| | | CGCAGCTGCTGATCTACCTGGGCTCGAACAGGGCCAGCGGAGTGCCTGAC |
| | | CGGTTCTCCGGGTCGGGAAGCGGGACCGACTTCAAGCTGCAAATCTCGAG |
| | | AGTGGAGGCCGAGGACGTGGGAATCTACTACTGTATGCAGGGCCGCCAGT |
| | | TTCCGTACTCGTTCGGACAGGGCACCAAAGTGGAAATCAAG |
| 139102-aa | 274 | QVQLVQSGAEVKKPGASVKVSCKASGYTFSNYGITWVRQAPGQGLEWMGW |
| VH | | ISAYNGNTNYAQKFQGRVTMTRNTSISTAYMELSSLRSEDTAVYYCARGP |
| | | YYYYMDVWGKGTMVTVSS |
| 139102-aa | 289 | EIVMTQSPLSLPVTPGEPASISCRSSQSLLYSNGYNYVDWYLQKPGQSPQ |
| VL | | LLIYLGSNRASGVPDRESGSGSGTDFKLQISRVEAEDVGIYYCMQGRQFP |
| | | YSFGQGTKVEIK |

139104

| | | |
|---|---|---|
| 139104-aa | 245 | EVQLLETGGGLVQPGGSLRLSCAVSGFALSNHGMSWVRRAPGKGLEWVSG |
| ScFv domain | | IVYSGSTYYAASVKGRFTISRDNSRNTLYLQMNSLRPEDTATYYCSAHGG |
| | | ESDVWGQGTTVTVSSASGGGGSGGRASGGGGSEIVLTQSPATLSVSPGES |
| | | ATLSCRASQSVSSNLAWYQQNPGQAPRLLIYGASTRASGIPDRFSGSGSG |
| | | TDFTLTISSLQAEDVAVYYCQQYGSSLTFGGGTKVEIK |
| 139104-nt | 260 | GAAGTGCAATTGCTCGAAACTGGAGGAGGTCTGGTGCAACCTGGAGGATC |
| ScFv domain | | ACTTCGCCTGTCCTGCGCCGTGTCGGGCTTTGCCCTGTCCAACCATGGAA |
| | | TGAGCTGGGTCCGCCGCGCGCCGGGGAAGGGCCTCGAATGGGTGTCCGGC |
| | | ATCGTCTACTCCGGCTCCACCTACTACGCCGCGTCCGTGAAGGGCCGGTT |
| | | CACGATTTCACGGGACAACTCGCGGAACACCCTGTACCTCCAAATGAATT |
| | | CCCTTCGGCCGGAGGATACTGCCATCTACTACTGCTCCGCCCACGGTGGC |
| | | GAATCCGACGTCTGGGGCCAGGGAACCACCGTGACCGTGTCCAGCGCGTC |
| | | CGGGGGAGGAGGAAGCGGGGGTAGAGCATCGGGTGGAGGCGGATCAGAGA |
| | | TCGTGCTGACCCAGTCCCCCGCCACCTTGAGCGTGTCACCAGGAGAGTCC |
| | | GCCACCCTGTCATGCCGCGCCAGCCAGTCCGTGTCCTCCAACCTGGCTTG |
| | | GTACCAGCAGAAGCCGGGGCAGGCCCCTAGACTCCTGATCTATGGGGCGT |
| | | CGACCCGGGCATCTGGAATTCCCGATAGGTTCAGCGGATCGGGCTCGGGC |
| | | ACTGACTTCACTCTGACCATCTCCTCGCTGCALGCCGAGGACGTGGCTGT |
| | | GTACTACTGTCAGCAGTACGGAAGCTCCCTGACTTTCGGTGGCGGGACCA |
| | | AACTCGAGATTAAG |
| 139104-aa | 275 | EVQLLETGGGLVQPGGSLRLSCAVSGFALSNHGMSWVRRAPGKGLEWVSG |
| VH | | IVYSGSTYYAASVKGRFTISRDNSRNTLYLQMNSLRPEDTAIYYCSAHGG |
| | | ESDVWGQGTTVTVSS |
| 139104-aa | 290 | EIVLTQSPATLSVSPGESATLSCRASQSVSSNLAWYQQKPGQAPRLLIYG |
| VL | | ASTRASGIPDRFSGSGSGTDFTLTISSLQAEDVAVYYCQQYGSSLTFGGG |
| | | TKVEIK |

139106

| | | |
|---|---|---|
| 139106-aa | 246 | EVQLVETGGGLVQPGGSLRLSCAVSGFALSNHGMSWVRRAPGKGLEWVSG |
| ScFv domain | | IVYSGSTYYAASVKGRFTISRDNSRNTLYLQMNSLRPEDTAIYYCSAHGG |
| | | ESTDVWGQGTTVTVSSASGGGGSGGRASGGGGSEIVMTQSPATLSVSPGER |
| | | ATLSCRASQSVSSKLAWYQQKPGQAPRLLMYGASIRATGIPDRFSGSGSG |
| | | TEFTLTISSLEPEDFAVYYCQQYGSSSWTFGQGTKVEIK |
| 139106-nt | 261 | GAAGTGCAATTGGTGGAAACTGGAGGAGGACTTGTGCAACCTGGAGGATC |
| ScFv domain | | ATTGAGACTGAGCTGCGCAGTGTCGGGATTCGCCCTGAGCAACCATGGAA |
| | | TGTCCTGGGTCAGAAGGGCCCCTGGAAAAGGCCTCGAATGGGTGTCAGGG |
| | | ATCGTGTACTCCGGTTCCACTTACTACGCCGCCTCCGTGAAGGGGCGCTT |
| | | CACTATCTCACGGGATAACTCCCGCAATACCCTGTACCTCCAAATGAACA |
| | | GCCTGCGGCCGGAGGATACCGCCATCTACTACTGTTCCGCCCACGGTGGA |
| | | GAGTCTGACGTCTGGGGCCAGGGAACTACCGTGACCGTGTCCTCCGCGTC |
| | | CGGCGGTGGAGGGAGCGGCGGCCGCGCCAGCGGCGGCGGAGGCTCCGAGA |
| | | TCGTGATGACCCAGAGCCCCGCTACTCTGTCGGTGTCGCCCGGAGAAAGG |
| | | GCGACCCTGTCCTGCCGGGCGTCGCAGTCCGTGAGCAGCAAGCTGGCTTG |
| | | GTACCAGCAGAAGCCGGGCCAGGCACCACGCCTGCTTATGTACGGTGCCT |
| | | CCATTCGGGCCACCGGAATCCCGGACCGGTTCTCGGGGTCGGGGTCCCGT |
| | | ACCGAGTTCACACTGACCATTTCCTCGCTCGAGCCCGAGGACTTTGCCGT |
| | | CTATTACTGCCAGCAGTACGGCTCCTCCTCATGGACGTTCGGCCAGGGGA |
| | | CCAAGGTCGAAATCAAG |
| 139106-aa | 276 | EVQLVETGGGLVQPGGSLRLSCAVSGFALSNHGMSWVRRAPGKGLEWVSG |
| VH | | IVYSGSTYYAASVKGRFTISRDNSRNTLYLQMNSLRPEDTAIYYCSAHGG |
| | | ESDVWGQGTTVTVSS |
| 139106-aa | 291 | EIVMTQSPATLSVSPGERATLSCRASQSVSSKLAWYQQKPGQAPRLLMYG |
| VL | | ASIRATGIPDRFSGSGSGTEFTLTISSLEPEDFAVYYCQQYGSSSWTFGQ |
| | | GTKVEIK |

139107

| | | |
|---|---|---|
| 139107-aa | 247 | EVQLVETGGGVVQPGGSLRLSCAVSGFALSNHGMSWVRRAPGKGLEWVSG |
| ScFv domain | | IVYSGSTYYAASVKGRFTISRDNSRNTLYLQMNSLRPEDTAIYYCSAHGG |
| | | ESDVWGQGTTVTVSSASGGGGSGGRASGGGGSEIVLTQSPGTLSLSPGER |
| | | ATLSCRASQSVGSTNLAWYQQKPGQAPRLLIYDASNRATGIPDRFSGGGS |
| | | GTDFTLTISRLEPEDFAVYYCQQYGSSPPWTFGQGTKVEIK |
| 139107-nt | 262 | GAAGTGCAATTGGTGGAGACTGGAGGAGGAGTGGTGCAACCTGGAGGAAG |
| ScFv domain | | CCTGAGACTGTCATGCGCGGTGTCGGGCTTCGCCCTCTCCAACCACGGAA |
| | | TGTCCTGGGTCCGCCGGGCCCCTGGGAAAGGACTTGAATGGGTGTCCGGC |
| | | ATCGTGTACTCGGGTTCCACCTACTACGCGGCCTCAGTGAAGGGCCGGTT |
| | | TACTATTAGCCGCGACAACTCCAGAAACACACTGTACCTCCAAATGAACT |
| | | CGCTGCGGCCGGAAGATACCGCTATCTACTACTGCTCCGCCCATGGGGGA |
| | | GAGTCGGACGTCTGGGGACAGGGCACCACTGTCACTGTGTCCAGCGCTTC |
| | | CGGCGGTGGTGGAAGCGGGGGACGGGCCTCAGGAGGCGGTGGCAGCGAGA |
| | | TTGTGCTGACCCAGTCCCCCGGGACCCTGAGCCTGTCCCCGGGAGAAAGG |
| | | GCCACCCTCTCCTGTCGGGCATCCCAGTCCGTGGGGTCTACTAACCTTGC |
| | | ATGGTACCAGCAGAAGCCCGGCCAGGCCCCTCGCCTGCTGATCTACGACG |
| | | CGTCCAATAGAGCCACCGGCATCCCGGATCGCTTCAGCGGAGGCGGATCG |
| | | GGCACCGACTTCACCCTCACCATTTCAAGGCTGGAACCGGAGGACTTCGC |
| | | CGTGTACTACTGCCAGCAGTATGGTTCGTCCCCACCCTGGACGTTCGGCC |
| | | AGGGGACTAAGGTCGAGATCAAG |
| 139107-aa | 277 | EVQLVETGGGVVQPGGSLRLSCAVSGFALSNHGMSWVRRAPGKGLEWVSG |
| VH | | IVYSGSTYYAASVKGRFTISRDNSRNTLYLQMNSLRPEDTAIYYCSAHGG |
| | | ESDVWGQGTTVTVSS |
| 139107-aa | 292 | EIVLTQSPGTLSLSPGERATLSCRASQSVGSTNLAWYQQKPGQAPRLLIY |
| VL | | DASNRATGIPDRFSGGGSGTDFTLTISRLEPEDFAVYYCQQYGSSPPWTF |
| | | GQGTKVEIK |

139108

| | | |
|---|---|---|
| 139108-aa | 248 | QVQLVESGGGLVKPGGSLRLSCAASGFTFSDYYMSWIRQAPGKGLEWVSY |
| ScFv domain | | ISSSGSTIYYADSVKGRFTISRDNAKNSLYLQMNSLRAEDTAVYYCARES |
| | | GDGMDVWGQGTTVTVSSASGGGGSGGRASGGGGSDIQMTQSPSSLSASVG |
| | | DRVTITCRASQSISSYLNWYQQKPGKAPKLLIYAASSLQSGVPSRFSGSG |
| | | SGTDFTLTISSLQPEDFATYYCQQSYTLAFGQGTKVDIK |
| 139108-nt | 263 | CAAGTGCAACTCGTGGAATCTGGTGGAGGACTCGTGAAACCTGGAGGATC |
| ScFv domain | | ATTGAGACTGTCATGCGCGGCCTCGGGATTCACGTTCTCCGATTACTACA |
| | | TGAGCTGGATTCGCCAGGCTCCGGGGAAGGGACTGGAATGGGTGTCCTAC |
| | | ATTTCCTCATCCGGCTCCACCATCTACTACGCGGACTCCGTGAAGGGGAG |
| | | ATTCACCATTAGCCGCGATAACGCCAAGAACAGCCTGTACCTTCAGATGA |
| | | ACTCCCTGCGGGCTGAAGATACTGCCGTCTACTACTGCGCAAGGGAGAGC |
| | | GGAGATGGGATGGACGTCTGGGGACAGGGTACCACTGTGACCGTGTCGTC |
| | | GGCCTCCGGCGGAGGGGGTTCGGGTGGAAGGGCCAGCGGCGGCGGAGGCA |
| | | GCGACATCCAGATGACCCAGTCCCCCTCATCGCTGTCCGCCTCCGTGGGC |
| | | GACCGCGTCACCATCACATGCCGGGCCTCACAGTCGATCTCCTCCTACCT |
| | | CAATTGGTATCAGCAGAAGCCCGGAAAGGCCCCTAAGCTTCTGATCTACG |
| | | CAGCGTCCTCCCTGCAATCCGGGGTCCCATCTCGGTTCTCCGGCTCCCCC |
| | | AGCGGTACCGACTTCACTCTGACCATCTCGAGCCTGCAGCCGGAGGACTT |
| | | CGCCACTTACTACTGTCAGCAAAGCTACACCCTCGCGTTTGGCCAGGGCA |
| | | CCAAAGTGGACATCAG |
| 139108-aa | 278 | QVQLVESGGGLVKPGGSLRLSCAASGFTFSDYYMSWIRQAPGKGLEWVSY |
| VH | | ISSSGSTIYYADSVKGRFTISRDNAKNSLYLQMNSLRAEDTAVYYCARES |
| | | GDGMDVWGQGTTVSS |
| 139108-aa | 293 | DIQMTQSPSSLSASVGDRVTITCRASQSISSYLNWYQQKPGKAPKLLIYA |
| VL | | ASSLQSGVPSRFSGSGSGTDFTLTISSLQPEDFATYYCQQSYTLAFGQGT |
| | | KVDIK |

139110

| | | |
|---|---|---|
| 139110-aa | 250 | QVQLVQSGGGLVKPGGSLRLSCAASGFTFSDYYMSWIRQAPGKGLEWVSY |
| ScFv domain | | ISSSGNTIYYADSVKGRFTISRDNAKNSLYLQMNSLRAEDTAVYYCARST |
| | | MVREDYWGQGTLVTVSSASGGGGSGGRASGGGGSDIVLTQSPLSLPVTLG |
| | | QPASISCKSSESLVHNSGKTYLNWFHQRPGQSPRRLIYEVSNRDSGVPDR |
| | | FTGSGSGTDFTLKISRVEAEDVGVYYCMQGTHWPGTFGQGTKLEIK |
| 139110-nt | 265 | CAAGTGCAACTGGTGCAAAGCGGAGGAGGATTGGTCAAACCCGGAGGAAG |
| SciFy domain | | CCTGAGACTGTCATGCGCGGCCTCTGGATTCACCTTCTCCGATTACTACA |
| | | TGTCATGGATCAGACAGGCCCCGGGGAAGGGCCTCGAATGGGTGTCCTAC |
| | | ATCTCGTCCTCCGGGAACACCATCTACTACGCCGACAGCGTGAAGGGCCG |
| | | CTTTACCATTTCCCGCGACAACGCAAAGAACTCGCTGTACCTTCAGATGA |
| | | ATTCCCTGCGGGCTGAAGATACCGCGGTGTACTATTGCGCCCGGTCCACT |
| | | ATGGTCCGGGAGGACTACTGGGGACAGGGCACACTCGTGACCGTGTCCAG |
| | | CGCGAGCGGGGGTGGAGGCAGCGGTGGACGCGCCTCCGGCGGCGGCGGTT |
| | | CAGACATCGTGCTGACTCAGTCGCCCCTGTCGCTGCCGGTCACCCTGGGC |
| | | CAACCGGCCTCAATTAGCTGCAAGTCCTCGGAGAGCCTGGTGCACAACTC |
| | | AGGAAAGACTTACCTGAACTGGTTCCATCAGCGGCCTGGACAGTCCCCAC |
| | | GGAGGCTCATCTATGAAGTGTCCAACAGGGATTCGGGGGTGCCCGACCGC |
| | | TTCACTGGCTCCGGGTCCGGCACCGACTTCACCTTGAAAATCTCCAGAGT |
| | | GGAAGCCGAGGACGTGGGCGTGTACTACTGTATGCAGGGTACCCACTGGC |
| | | CTGGAACCTTTGGACAAGGAACTAAGCTCGAGATTAAG |
| 139110-aa | 280 | QVQLVQSGGGLVKPGGSLRLSCAASGFTFSDYYMSWIRQAPGKGLEWVSY |
| VH | | ISSSGNTIYYADSVKGRFTISRDNAKNSLYLQMNSLRAEDTAVYYCARST |
| | | MVREDYWGQGTLVTVSS |
| 139110-aa | 295 | DIVLTQSPLSLPVTLGQPASISCKSSESLVHNSGKTYLNWFHQRPGQSPR |
| VL | | RLIYEVSNRDSGVPDRFTGSGSGTDFTLKISRVEAEDVGVYYCMQGTHWP |
| | | GTFGQGTKLEIK |

139112

| | | |
|---|---|---|
| 139112-aa | 251 | QVQLVESGGGLVQPGGSLRLSCAVSGFALSNHGMSWVRRAPGKGLEWVSG |
| ScFv domain | | IVYSGSTYYAASVKGRFTISRDNSRNTLYLQMNSLRPEDTAIYYCSAHGG |
| | | ESDVWGQGTTVTVSSASGGGGSGGRASGGGGSDIRLTQSPSPLSASVGDR |
| | | VTITCQASEDINKFLNWYHQTPGKAPKLLIYDASTLQTGVPSRFSGSGSG |
| | | TDFTLTINSLEDIGTYYCQQYESLPLTFGGGTKVEIK |
| 139112-nt | 266 | CAAGTGCAACTCGTGGAATCTGGTGGAGGACTCGTGCAACCCGGTGGAAG |
| ScFv domain | | CCTTAGGCTGTCGTGCGCCGTCAGCGGGTTTGCTCTGAGCAACCATGGAA |
| | | TGTCCTGGGTCCGCCGGGCACCGGGAAAAGGGCTGGAATGGGTGTCCGGC |
| | | ATCGTGTACAGCGGGTCAACCTATTACGCCGCGTCCGTGAAGGGCAGATT |
| | | CACTATCTCAAGAGACAACAGCCGGAACACCCTGTACTTGCAAATGAATT |
| | | CCCTGCGCCCCGAGGACACCGCCATCTACTACTGCTCCGCCCACGGAGGA |
| | | GAGTCGGACGTGTGGGGCCAGGGAACGACTGTGACTGTGTCCAGCGCATC |
| | | AGGAGGGGGTGGTTCGGGCGGCCGGGCCTCGGGGGGAGGAGGTTCCGACA |
| | | TTCGGCTGACCCAGTCCCCGTCCCCACTGTCGGCCTCCGTCGGCGACCGC |
| | | GTGACCATCACTTGTCAGGCGTCCGAGGACATTAACAAGTTCCTGAACTG |
| | | GTACCACCAGACCCCTGGAAAGGCCCCCAAGCTGCTGATCTACGATGCCT |
| | | CGACCCTTCAAACTGGAGTGCCTAGCCGGTTCTCCGGGTCCGGCTCCCCC |
| | | ACTGATTTCACTCTGACCATCAACTCATTGCAGCCGGAAGATATCGGGAC |
| | | CTACTATTGCCAGCAGTACGAATCCCTCCCGCTCACATTCGGCGGGGGAA |
| | | CCAAGGTCGAGATTAAG |
| 139112-aa | 281 | QVQLVESGGGLVQPGGSLRLSCAVSGFALSNHGMSWVRRAPGKGLEWVSG |
| VH | | IVYSGSTYYAASVKGRFTISRDNSRNTLYLQMNSLRPEDTAIYYCSAHGG |
| | | ESDVWGQGTTVTVSS |
| 139112-aa | 296 | DIRLTQSPSPLSASVGDRVTITCQASEDINKFLNWYHQTPGKAPKLLIYD |
| VL | | ASTLQTGVPSRFSGSGSGTDFTLTINSLQPEDIGTYYCQQYESLPLTFGG |
| | | GTKVEIK |

139113

| | | |
|---|---|---|
| 139113-aa | 252 | EVQLVETGGGLVQPGGSLRLSCAVSGFALSNHGMSWVRRAPGKGLEWVSG |
| ScFv domain | | IVYSGSTYYAASVKGRFTISRDNSRNTLYLQMNSLRPEDTAIYYCSAHGG |
| | | ESDVWGQGTTVTVSSASGGGGSGGRASGGGGSETTLTQSPATLSVSPGER |
| | | ATLSCRASQSVGSNLAWYQQKPGQGPRLLIYGASTRATGIPARFSGSGSG |
| | | TEFTLTISSLQPEDFAVYYCQQYNDWLPVTFGQGTKVEIK |
| 139113-nt | 267 | GAAGTGCAATTGGTGGAAACTGGAGGAGGACTTGTGCAACCTGGAGGATC |
| ScFv domain | | ATTGCGGCTCTCATGCGCTGTCTCCGGCTTCGCCCTGTCAkATCACGGGA |
| | | TGTCGTGGGTCAGACGGGCCCCGGGAAAGGGTCTGGAATGGGTGTCGGGG |
| | | ATTGTGTACAGCGGCTCCACCTACTACGCCGCTTCGGTCAAGGGCCGCTT |
| | | CACTATTTCACGGGACAACAGCCGCAACACCCTCTATCTGCAAATGAACT |
| | | CTCTCCGCCCGGAGGATACCGCCATCTACTACTGCTCCGCACACGGCGGC |
| | | GAATCCGACGTGTGGGGACAGGGAACCACTGTCACCGTGTCGTCCGCATC |
| | | CGGTGGCGGAGGATCGGGTGGCCGGGCCTCCGGGGGCGGCGGCAGCGAGA |
| | | CTACCCTGACCCAGTCCCCTGCCACTCTGTCCGTGAGCCCGGGAGAGAGA |
| | | GCCACCCTTAGCTGCCGGGCCAGCCAGAGCGTGGGCTCCAACCTGGCCTG |
| | | GTACCAGCAGAAGCCAGGACAGGGTCCCAGGCTGCTGATCTACGGAGCCT |
| | | CCACTCGCGCGACCGGCATCCCCGCGAGGTTCTCCGGGTCGGGTTCCGGG |
| | | ACCGAGTTCACCCTGACCATCTCCTCCCTCCAACCGGAGGACTTCGCGGT |
| | | GTACTACTGTCAGCAGTACAACGATTGGCTGCCCGTGACATTTGGACAGG |
| | | GGACGAAGGTGGAAATCAAA |
| 139113-aa | 282 | EVQLVETGGGLVQPGGSLRLSCAVSGFALSNHGMSWVRRAPGKGLEWVSG |
| VH | | IVYSGSTYYAASVKGRFTISRDNSRNTLYLQMNSLRPEDTAIYYCSAHGG |
| | | ESDVWGQGTTVTVSS |
| 139113-aa | 297 | ETTLTQSPATLSVSPGERATLSCRASQSVGSNLAWYQQKPGQGPRLLIYG |
| VL | | ASTRATGIPARFSGSGSGTEFTLTISSLQPEDFAVYYCQQYNDWLPVTFG |
| | | QGTKVEIK |

139114

| | | |
|---|---|---|
| 139114-aa | 253 | EVQLVESGGGLVQPGGSLRLSCAVSGFALSNHGMSWVRRAPGKGLEWVSG |
| ScFv domain | | IVYSGSTYYAASVKGRFTISRDNSRNTLYLQMNSLRPEDTAIYYCSAHGG |
| | | ESDVWGQGTTVTVSSASGGGGSGGRASGGGGSEIVLTQSPGTLSLSPGER |
| | | ATLSCRASQSIGSSSLAWYQQKPGQAPRLLMYGASSRASGIPDRFSGSGS |
| | | GTDFTLTISRLEPEDFAVYYCQQYAGSPPFTFGQGTKVEIK |
| 139114-nt | 268 | GAAGTGCAATTGGTGGAATCTGGTGGAGGACTTGTGCAACCTGGAGGATC |
| ScFv domain | | ACTGAGACTGTCATGCGCGGTGTCCGGTTTTGCCCTGAGCAATCATGGGA |
| | | TGTCGTGGGTCCGGCGCGCCCCCGGAAAGGGTCTGGAATGGGTGTCGGGT |
| | | ATCGTCTACTCCGGGAGCACTTACTACGCCGCGAGCGTGAAGGGCCGCTT |
| | | CACCATTTCCCGCGATAACTCCCGCAACACCCTGTACTTGCAAATGAACT |
| | | CGCTCCGGCCTGAGGACACTGCCATCTACTACTGCTCCGCACACGGAGGA |
| | | GAATCCGACGTGTGGGGCCAGGGAACTACCGTGACCGTCAGCAGCGCCTC |
| | | CGGCGGCGGGGGCTCAGGCGGACGGGCTAGCGGCGGCGGTGGCTCCGAGA |
| | | TCGTGCTGACCCAGTCGCCTGGCACTCTCTCGCTGAGCCCCGGGGAAAGG |
| | | GCAACCCTGTCCTGTCCGGCCAGCCAGTCCATTGGATCATCCTCCCTCGC |
| | | CTGGTATCAGCAGAAACCGGGACAGGCTCCGCGGCTGCTTATGTATGGGG |
| | | CCAGCTCAAGAGCCTCCGGCATTCCCGACCGGTTCTCCGGGTCCGGTTCC |
| | | GGCACCGATTTCACCCTGACTATCTCGAGGCTGGAGCCAGAGGACTTCGC |
| | | CGTGTACTACTGCCAGCAGTACGCGGGGTCCCCGCCGTTCACGTTCGGAC |
| | | AGGGAACCAAGGTCGAGATCAAG |
| 139114-aa | 283 | EVQLVESGGGLVQPGGSLRLSCAVSGFALSNHGMSWVRRAPGKGLEWVSG |
| VH | | IVYSGSTYYAASVKGRETISRDNSRNTLYLQMNSLRPEDTAIYYCSAHGG |
| | | ESDVWGQGTTVTVSS |
| 139114-aa | 298 | EIVLTQSPGTLSLSPGERATLSCRASQSIGSSSLAWYQQKPGQAPRLLMY |
| VL | | GASSRASGIPDRFSGSGSGTDFTLTISRLEPEDFAVYYCQQYAGSPPFTF |
| | | GQGTKVEIK |

149362

| | | |
|---|---|---|
| 149362-aa | 329 | QVQLQESGPGLVKPSETLSLTCTVSGGSISSSYYYWGWIRQPPGKGLEWI |
| ScFv domain | | GSIYYSGSAYYNPSLKSRVTISVDTSKNQFSLRLSSVTAADTAVYYCARH |
| | | WQEWPDAFDIWGQGTMVTVSSGGGGSGGGGSGGGGSETTLTQSPAFMSAT |
| | | PGDKVIISCKASQDIDDAMNWYQQKPGEAPLFIIQSATSPVPGIPPRFSG |
| | | SGFGTDFSLTINNIESEDAAYYFCLQHDNFPLTFGQGTKLEIK |
| 149362-nt | 350 | CAAGTGCAGCTTCAGGAAAGCGGACCGGGCCTGGTCAAGCCATCCGAAAC |
| ScFv domain | | TCTCTCCCTGACTTGCACTGTGTCTGGCGGTTCCATCTCATCGTCGTACT |
| | | ACTACTGGGGCTGGATTAGGCAGCCGCCCGGAAAGGGACTGGAGTGGATC |
| | | GGAAGCATCTACTATTCCGGCTCGGCGTACTACAACCCTAGCCTCAAGTC |
| | | GAGAGTGACCATCTCCGTGGATACCTCCAAGAACCAGTTTTCCCTGCGCC |
| | | TGAGCTCCGTGACCGCCGCTGACACCGCCGTGTACTACTGTGCTCGGCAT |
| | | TGGCAGGAATGGCCCGATGCCTTCGACATTTGGGGCCAGGGCACTATGGT |
| | | CACTGTGTCATCCGGGGGTGGAGGCAGCGGGGGAGGAGGGTCCGGGGGGG |
| | | GAGGTTCAGAGACAACCTTGACCCAGTCACCCGCATTCATGTCCGCCACT |
| | | CCGGGAGACAAGGTCATCATCTCGTGCAAAGCGTCCCAGGATATCGACGA |
| | | TGCCATGAATTGGTACCAGCAGAAGCCTGGCGAAGCGCCGCTGTTCATTA |
| | | TCCAATCCGCAACCTCGCCCGTGCCTGGAATCCCACCGCGGTTCAGCGGC |
| | | AGCGGTTTCGGAACCGACTTTTCCCTGACCATTAACAACATTGAGTCCGA |
| | | GGACGCCGCCTACTACTTCTGCCTGCAACACGACAACTTCCCTCTCACGT |
| | | TCGGCCAGGGAACCAAGCTGGAAATCAAG |
| 149362-aa | 371 | QVQLQESGPGLVKPSETLSLTCTVSGGSISSSYYYWGWIRQPPGKGLEWI |
| VH | | GSIYYSGSAYYNPSLKSRVTISVDTSKNQFSLRLSSVTAADTAVYYCARH |
| | | WQEWPDAFDIWGQGTMVTVSS |
| 149362-aa VL | 392 | ETTLTQSPAFMSATPGDKVIISCKASQDIDDAMNWYQQKPGEAPLFIIQS |
| | | ATSPVPGIPPRFSGSGFGTDFSLTINNIESEDAAYYFCLQHDNFPLTFGQ |
| | | GTKLEIK |

149363

| | | |
|---|---|---|
| 149363-aa | 330 | QVNLRESGPALVKPTQTLTLTCTFSGFSLRTSGMCVSWIRQPPGKALEWL |
| ScFv domain | | ARIDWDEDKFYSTSLKTRLTISKDTSDNQVVLRMTNMDPADTATYYCARS |
| | | GAGGTSATAFDIWGPGTMVTVSSGGGGSGGGGSGGGGSDIQMTQSPSSLS |
| | | ASVGDRVTITCPASQDIYNNLAWFQLKPGSAPRSLMYAANKSQSGVPSRF |
| | | SGSASGTDFTLTISSLQPEDFATYYCQHYYRFPYSFGQGTKLEIK |
| 149363-nt | 351 | CAAGTCAATCTGCGCGAATCCGGCCCCGCCTTGGTCAAGCCTACCCAGAC |
| ScFv domain | | CCTCACTCTGACCTGTACTTTCTCCCGCTTCTCCCTGCGGACTTCCGGGA |
| | | TGTGCGTGTCCTGGATCAGACAGCCTCCGGGAAAGGCCCTGGAGTGGCTC |
| | | GCTCGCATTGACTGGGATGAGGACAAGTTCTACTCCACCTCACTCAAGAC |
| | | CAGGCTGACCATCAGCAAAGATACCTCTGACAACCAAGTGGTGCTCCGCA |
| | | TGACCAACATGGACCCAGCCGACACTGCCACTTACTACTGCGCGAGGAGC |
| | | GGAGCGGGCGGAACCTCCGCCACCGCCTTCGATATTTGGGGCCCGGGTAC |
| | | CATGGTCACCGTGTCAAGCGGAGGAGGGGGGTCCGGGGGCGGCGGTTCCG |
| | | GGGGAGGCGGATCGGACATTCAGATGACTCAGTCACCATCGTCCCTGAGC |
| | | GCTAGCGTGGGCGACAGAGTGACAATCACTTGCCGGGCATCCCAGGACAT |
| | | CTATAACAACCTTGCGTGGTTCCAGCTGAAGCCTGGTTCCGCACCGCGGT |
| | | CACTTATGTACGCCGCCAACAAGAGCCAGTCGGGAGTGCCGTCCCGGTTT |
| | | TCCGGTTCGGCCTCGGGAACTGACTTCACCCTGACGATCTCCAGCCTGCA |
| | | ACCCGAGGATTTCGCCACCTACTACTGCCAGCACTACTACCGCTTTCCCT |
| | | ACTCGTTCGGACAGGGALCCAAGCTGGAAATCAAG |
| 149363-aa | 372 | QVNLRESGPALVKPTQTLTLTCTFSGFSLRTSGMCVSWIRQPPGKALEWL |
| VH | | ARIDWDEDKFYSTSLKTRLTISKDTSDNQVVLRMTNMDPADTATYYCARS |
| | | GAGGTSATAFDIWGPGTMVTVSS |
| 149363-aa VL | 393 | DIQMTQSPSSLSASVGDRVTITCRASQDIYNNLAWFQLKPGSAPRSLMYA |
| | | ANKSQSGVPSRFSGSASGTDFTLTISSLQPEDFATYYCQHYYRFPYSFGQ |
| | | GTKLEIK |

149364

| | | |
|---|---|---|
| 149364-aa | 331 | EVQLVESGGGLVKPGGSLRLSCAASGFTFSSYSMNWVRQAPGKGLEWVSS |
| ScFv domain | | ISSSSSYIYYADSVKGRFTISRDNAKNSLYLQMNSLRAEDTAVYYCAKTI |
| | | AAVYAFDIWGQGTTVTVSSGGGGSGGGGSGGGGSEIVLTQSPLSLPVTPE |
| | | EPASISCRSSQSLLHSNGYNYLDWYLQKPGQSPQLLIYLGSNRASGVPDR |
| | | FSGSGSGTDFTLKISRVEAEDVGVYYCMQALQTPYTFGQGTKLEIK |
| 149364-nt | 352 | GAAGTGCAGCTTGTCGAATCCGGGGGGGGACTGGTCAAGCCGGGCGGATC |
| ScFv domain | | ACTGAGACTGTCCTGCGCCGCGAGCGGCTTCACGTTCTCCTCCTACTCCA |
| | | TGAACTGGGTCCGCCAAGCCCCCGGGAAGGGACTGGAATGGGTGTCCTCT |
| | | ATCTCCTCGTCGTCGTCCTACATCTACTACGCCGACTCCGTGAAGGGAAG |
| | | ATTCACCATTTCCCGCGACAACGCAAAGAACTTACTGTACTTGCAAATGA |
| | | ACTCACTCCGGGCCGAAGATACTGCTGTGTACTATTGCGCCAAGACTATT |
| | | GCCGCCGTCTACGCTTTCGACATCTGGGGCCAGGGAACCACCGTGACTGT |
| | | GTCGTCCGGTGGTGGTGGCTCGGGCGGAGGAGGAAGCGGCGGCGGGGGGT |
| | | CCGAGATTGTGCTGACCCAGTCGCCACTGAGCCTCCCTGTGACCCCCGAG |
| | | GAACCCGCCAGCATCAGCTGCCGGTCCAGCCAGTCCCTGCTCCACTCCAA |
| | | CGGATACAATTACCTCGATTGGTACCTTCAGAAGCCTGGACAAAGCCCGC |
| | | AGCTGCTCATCTACTTGGGATCAAACCGCGCGTCAGGAGTGCCTGACCGG |
| | | TTCTCCGGCTCGGGCAGCGGTACCGATTTCACCCTGAAAATCTCCAGGGT |
| | | GGAGGCAGAGGACGTGGGAGTGTATTACTGTATGCAGGCGCTGCAGACTC |
| | | CGTACACATTTGGGCAGGGCACCAAGCTGGAGATCAAG |
| 149364-aa | 373 | EVQLVESGGGINKPGGSLRLSCAASGFTFSSYSMNWVRQAPGKGLEWVSS |
| VH | | ISSSSSYIYYADSVKGRFTISRDNAKNSLYLQMNSLRAEDTAVYYCAKTI |
| | | AAVYAFDIWGQGTTVTVSS |
| 149364-aa VL | 394 | EIVLTQSPLSLPVTPEERASISCRSSQSLLHSNGYNYLDWYLQKPGQSPQ |
| | | LLIYLGSNRASGVPDRFSGSGSGTDFTLKISRVEAEDVGVYYCMQALQTP |
| | | YTFGQGTKLEIK |

149365

| | | |
|---|---|---|
| 149365-aa | 332 | EVQLVESGGGLVKPGGSLRLSCAASGFTFSDYYMSWIRQAPGKGLEWVSY |
| ScFv domain | | ISSSGSTIYYADSVKGRFTISRDNAKNSLYLQMNSLRAEDTAVYYCARDL |
| | | RGAFDIWGQGTMVTVSSGGGGSGGGGSGGGGSSYVLTQSPSVSAAPGYTA |
| | | TISCGGNNIGTKSVHWYQQKPGQAPLLVIRDDSVRPSKIPGRFSGSNSGN |
| | | MATLTISGVQAGDEADFYCQVWDSDSEHVVFGGGTKLTVL |
| 149365-nt | 353 | GAAGTCCAGCTCGTGGAGTCCGGCGGAGGCCTTGTGAAGCCTGGAGGTTC |
| ScFv domain | | GCTGAGACTGTCCTGCGCCGCCTCCGGCTTCACCTTCTCCGACTACTACA |
| | | TGTCCTGGATCAGACAGGCCCCGGGAAAGGGCCTGGAATGGGTGTCCTAC |
| | | ATCTCGTCATCGGGCAGCACTATCTACTACGCGGACTCAGTGAAGGGGCG |
| | | GTTCACCATTTCCCGGGATAACGCGAAGAACTCGCTGTATCTGCAAATGA |
| | | ACTCACTGAGGGCCGAGGACACCGCCGTGTACTACTGCGCCCGCGATCTC |
| | | CGCGGGGCATTTGACATCTGGGGACAGGGAACCATGGTCACAGTGTCCAG |
| | | CGGAGGGGGAGGATCGGGTGGCGGAGGTTCCGGGGGTGGAGGCTCCTCCT |
| | | ACGTGCTGACTCAGAGCCCAAGCGTCAGCGCTGCGCCCGGTTACACGGCA |
| | | ACCATCTCCTGTGGCGGAAACAACATTGGGACCAAGTCTGTGCACTGGTA |
| | | TCAGCAGAAGCCGGGCCAAGCTCCCCTGTTGGTGATCCGCGATGACTCCG |
| | | TGCGGCCTAGCAAAATTCCGGGACGGTTCTCCGGCTCCAACAGCGGCAAT |
| | | ATGGCCACTCTCACCATCTCGGGAGTGCAGGCCGGAGATGAAGCCGACTT |
| | | CTACTGCCAAGTCTGGGACTCAGACTCCGAGCATGTGGTGTTCGGGGGCG |
| | | GAACCAAGCTGACTGTGCTC |
| 149365-aa | 374 | EVQLVESGGGLVKPGGSLRLSCAASGFTFSDYYMSWIRQAPGKGLEWVSY |
| VH | | ISSSGSTIYYADSVKGRFTISRDNAKNSLYLQMNSLRAEDTAVYYCARDL |
| | | RGAFDIWGQGTMVTVSS |
| 149365-aa VL | 395 | SYVLTQSPSVSAAPGYTATISCGGNNIGTKSVHWYQQKPGQAPLLVIRDD |
| | | SVRPSKIPGRFSGSNSGNMATLTISGVQAGDEADFYCQVWDSDSEHVVFG |
| | | GGTKLTVL |

149366

| | | |
|---|---|---|
| 149366-aa | 333 | QVQLVQSGAEVKKPGASVKVSCKPSGYTVTSHYIHWVRRAPGQGLEWMGM |
| ScFv domain | | INPSGGVTAYSQTLQGRVTMTSDTSSSTVYMELSSLRSEDTAMYYCAREG |
| | | SGSGWYFDFWGRGTLVTVSSGGGGSGGGGSGGGGSSYVLTQPPSVSVSPG |
| | | QTASITCSGDGLSKKYVSWYQQKAGQSPVVLISRDKERPSGIPDRFSGSN |
| | | SADTATLTISGTQAMDEADYYCQAWDDTTVVFGGGTKLTVL |
| 149366-nt | 354 | CAAGTGCAGCTGGTGCAGAGCGGGGCCGAAGTCAAGAAGCCGGGAGCCTC |
| ScFv domain | | CGTGLAAGTGTCCTGCAAGCCTTCGGGATACACCGTGACCTCCCACTACA |
| | | TTCATTGGGTCCGCCGCGCCCCCGGCCAAGGACTCGAGTGGATGGGCATG |
| | | ATCAACCCTAGCGGCGGAGTGACCGCGTACAGCCAGACGCTGCAGGGACG |
| | | CGTGACTATGACCTCGGATACCTCCTCCTCCACCGTCTATATGGAACTGT |
| | | CCAGCCTGCGGTCCGAGGATACCGCCATGTACTACTGCGCCCGGGAAGGA |
| | | TCAGGCTCCGGGTGGTATTTCGACTTCTGGGGAAGAGGCACCCTCGTGAC |
| | | TGTGTCATCTGGGGGAGGGGGTTCCGGTGGTGGCGGATCGGGAGGAGGCG |
| | | GTTCATCCTACGTGCTGACCCAGCCACCCTCCGTGTCCGTGAGCCCCGGC |
| | | CAGACTGCATCGATTACATGTAGCGGCGACGGCCTCTCCAAGAAATACGT |
| | | GTCGTGGTACCAGCAGAAGGCCGGACAGAGCCCGGTGGTGCTGATCTCAA |
| | | GAGATAAGGAGCGGCCTAGCGGAATCCCGGACAGGTTCTCGGGTTCCAAC |
| | | TCCGCGGACACTGCTACTCTGACCATCTCGGGGACCCAGGCTATGGACGA |
| | | AGCCGATTACTACTGCCAAGCCTGGGACGACACTACTGTCGTGTTTGGAG |
| | | GGGGCACCAAGTTGACCGTCCTT |
| 149366-aa | 375 | QVQLVQSGAEVKKPGASVKVSCKPSGYTVTSHYIHWVRRAPGQGLEWMGM |
| VH | | INPSGGVTAYSQTLQGRVTMTSDTSSSTVYMELSSLRSEDTAMYYCAREG |
| | | SGSGWYFDFWGRGTLVTVSS |
| 149366-aa VL | 396 | SYVLTQPPSVSVSPGQTASITCSGDGLSKKYVSWYQQKAGQSPVVLISRD |
| | | KERPSGIPDRFSGSNSADTATLTISGTQAMDEADYYCQAWDDTTVVFGGG |
| | | TKLTVL |

149367

| | | |
|---|---|---|
| 149367-aa | 334 | QVQLQESGPGLVKPSQTLSLTCTVSGGSISSGGYYWSWIRQHPGKGLEWI |
| ScFv domain | | GYIYYSGSTYYNPSLKSRVTISVDTSKNQFSLKLSSVTAADTAVYYCARA |
| | | GIAARLRGAFDIWGQGTMVTVSSGGGGSGGGGSGGGGSDIVMTQSPSSVS |
| | | ASVGDRVIITCRASQGIRNWLAWYQQKPGKAPNLLIYAASNLQSGVPSRF |
| | | SGSGSGADFTLTISSLQPEDVATYYCQKYNSAPFTFGPGTKVDIK |
| 149367-nt | 355 | CAAGTGCAGCTTCAGGAGAGCGGCCCGGGACTCGTGAAGCCGTCCCAGAC |
| ScFv domain | | CCTGTCCCTGACTTGCACCGTGTCGGGAGGAAGCATCTCGAGCGGAGGCT |
| | | ACTATTGGTCGTGGATTCGGCAGCACCCTGGAAAGGGCCTGGAATGGATC |
| | | GGCTACATCTACTACTCCGGCTCGACCTACTACAACCCATCGCTGAAGTC |
| | | CAGAGTGACAATCTCAGTGGACACGTCCAAGAATCAGTTCAGCCTGAAGC |
| | | TCTCTTCCGTGACTGCGGCCGACACCGCCGTGTACTACTGCGCACGCGCT |
| | | GGAATTGCCGCCCGGCTGAGGGGTGCCTTCGACATTTGGGGACAGGGCAC |
| | | CATGGTCACCGTGTCCTCCGGCGGCGGAGGTTCCGGGGGTGGAGGCTCAG |
| | | GAGGAGGGGGGTCCGACATCGTCATGACTCAGTCGCCCTCAAGCGTCAGC |
| | | GCGTCCGTCGGGGACAGAGTGATCATCACCTGTCGGGCGTCCCAGGGAAT |
| | | TCGCAACTGGCTGGCCTGGTATCAGCAGAAGCCCGGAAAGGCCCCCAACC |
| | | TGTTGATCTACGCCGCCTCAAACCTCCAATCCGGGGTGCCGAGCCGCTTC |
| | | AGCGGCTCCGGTTCGGGTGCCGATTTCACTCTGACCATCTCCTCCCTGCA |
| | | ACCTGAAGATGTGGCTACCTACTACTGCCAAAAGTACAACTCCGCACCTT |
| | | TTACTTTCGGACCGGGGACCAAAGTGGACATTAAG |
| 149367-aa | 376 | QVQLQESGPGLVKPSQTLSLTCTVSGGSISSGGYYWSWIRQHPGKGLEWI |
| VH | | GYIYYSGSTYYNPSLKSRVTISVDTSKNQFSLKLSSVTAADTAVYYCARA |
| | | GIAARLRGAFDIWGQGTMVTVSS |
| 149367-aa VL | 397 | DIVMTQSPSSVSASVGDRVIITCRASQGIRNWLAWYQQKPGKAPNLLIYA |
| | | ASNLQSGVPSRFSGSGSGADFTLTISSLQPEDVATYYCQKYNSAPFTFGP |
| | | GTKVDIK |

149368

| | | |
|---|---|---|
| 149368-aa | 335 | QVQLVQSGAEVKKPGSSVKVSCNASGGTFSSYAISWVRQAPGQGLEWMGG |
| ScFv domain | | IIPIFGTANYAQKFQGRVTITADESTSTAYMELSSLRSEDTAVYYCARRG |
| | | GYQLLRWDVGLLRSAFDIWGQGTMVTVSSGGGGSGGGGSGGGGSSYVLTQ |
| | | PPSVSVAPGQTARITCGGNNIGSKSVHTYQQKPGQAPVLVLYGKNNRPSG |
| | | VPDRFSGSRSGTTASLTITGAQAEDEADYYCSSRDSSGDHLRVFGTGTKV |
| | | TVL |
| 149368-nt | 356 | CAAGTGCAGCTGGTCCAGTCGGGCGCCGAGGTCAAGAAGCCCGGGAGCTC |
| ScFv domain | | TGTGAAAGTGTCCTGCAAGGCCTCCGGGGGCACCTTTAGCTCCTACGCCA |
| | | TCTCCTGGGTCCGCCAAGCACCGGGTCAAGGCCTGGAGTGGATGGGGGGA |
| | | ATTATCCCTATCTTCGGCACTGCCAACTACGCCCAGAAGTTCCAGGGACG |
| | | CGTGACCATTACCGCGGACGAATCCACCTCCACCGCTTATATGGAGCTGT |
| | | CCAGCTTGCGCTCGGAAGATACCGCCGTGTACTACTGCGCCCGGAGGGGT |
| | | GGATACCAGCTGCTGAGATGGGACGTGGGCCTCCTGCGGTCGGCGTTCGA |
| | | CATCTGGGGCCAGGGCACTATGGTCACTGTGTCCAGCGGAGGAGGCGGAT |
| | | CGGGAGGCGGCGGATCAGGGGGAGGCGGTTCCAGCTACGTGCTTACTCAA |
| | | CCCCCTTCGGTGTCCGTGGCCCCGGGAGAGACCGCCAGAATCACTTGCGG |
| | | AGGAAACAACATTGGGTCCAAGAGCGTGCATTGGTACCAGCAGAAGCCAG |
| | | GACAGGCCCCTGTGCTGGTGCTCTACGGGAAGAACAATCGGCCCAGCGGA |
| | | GTGCCGGACAGGTTCTCGGGTTCACGCTCCGGTACAACCGCTTCACTGAC |
| | | TATCACCGGGGCCCAGGCAGAGGATGAAGCGGACTACTACTGTTCCTCCC |
| | | GGGATTCATCCGGCGACCACCTCCGGGTGTTCGGAACCGGAACGAAGGTC |
| | | ACCGTGCTG |
| 149368-aa | 377 | QVQLVQSGAEVKKPGSSVKVSCKASGGTFSSYAISWVRQAPGQGLEWMGG |
| VH | | IIPIFGTANYAQKFQGRVTITADESTSTAYMELSSLRSEDTAVYYCARRG |
| | | GYQLLRWDVGLLRSAFDIWGQGTMVTVSS |
| 149368-aa VL | 398 | SYVLTQPPSVSVAPGQTARITCGGNNIGSKSVHWYQQKPGQAPVLVLYGK |
| | | NNRPSGVPDRFSGSRSGTTASLTITGAQAEDEADYYCSSRDSSGDHLRVF |
| | | GTGTKVTVL |

149369

| | | |
|---|---|---|
| 149369-aa | 336 | EVQLQQSGPGLVKPSQTLSLTCAISGDSVSSNSAAWNWIRQSPSRGLEWL |
| ScFv domain | | GRTYYRSKWYSFYAISLKSRIIINPDTSKNQFSLQLKSVTPEDTAVYYCA |
| | | RSSPEGLFLYWFDPWGQGTLVTVSSGGDGSGGGGSGGGGSSSELTQDPAV |
| | | SVALGQTIRITCQGDSLGNYYATWYQQKPGQAPVLVIYGTNNRPSGIPDR |
| | | FSASSSGNTASLTITGAQAEDEADYYCNSRDSSGHHLLFGTGTKVTL |
| 149369-nt | 357 | GAAGTGCAGCTCCAACAGTCAGGACCGGGGCTCGTGAAGCCATCCCAGAC |
| ScFv domain | | CCTGTCCCTGACTTGTGCCATCTCGGGAGATAGCGTGTCATCGAACTCCG |
| | | CCGCCTGGAACTGGATTCGGCAGAGCCCGTCCCGCGGACTGGAGTGGCTT |
| | | GGAAGGACCTACTACCGGTCCAAGTGGTACTCTTTCTACGCGATCTCGCT |
| | | GAAGTCCCGCATTATCATTAACCCTGATACCTCCAAGAATGAGTTCTCCC |
| | | TCCAACTGAAATCCGTCACCCCCGAGGACACAGCAGTGTATTACTGCGCA |
| | | CGGAGCAGCCCCGAAGGACTGTTCCTGTATTGGTTTGACCCCTGGGGCCA |
| | | GGGGACTCTTGTGACCGTGTCGAGCGGCGGAGATGGGTCCGGTGGCGGTG |
| | | GTTCGGGGGGCGGCGGATCATCATCCGAACTGACCCAGGACCCGGCTGTG |
| | | TCCGTGGCGCTGGGACAAACCATCCGCATTACGTGCCAGGGAGACTCCCT |
| | | GGGCAACTACTACGCCACTTGGTACCAGCAGAAGCCGGGCCAAGCCCCTG |
| | | TGTTGGTCATCTACGGGACCAACAACAGACCTTCCGGCATCCCCGACCGG |
| | | TTCAGCGCTTCGTCCTCCGGCAACACTGCCAGCCTGACCATCACTGGAGC |
| | | GCAGGCCGAAGATGAGGCCGACTACTACTGCAACAGCAGAGACTCCTCGG |
| | | GTCATCACCTCTTGTTCGGAACTGGAACCAAGGTCACCGTGCTG |
| 149369-aa | 378 | EVQLQQSGPGLVKPSQTLSLTCAISGDSVSSNSAAWNWIRQSPSRGLEWL |
| VH | | GRTYYRSKWYSFYAISLKSRIIINPDTSKNQFSLQLKSVTPEDTAVYYCA |
| | | RSSPEGLFLYWFDPWGQGTLVTVSS |
| 149369-aa VL | 399 | SSELTQDPAVSVALGQTIRITCQGDSLGNYYATWYQQKPGQAPVLVIYGT |
| | | NNRPSGIPDRFSASSSGNTASLTITGAQAEDEADYYCNSRDSSGHHLLFG |
| | | TGTKVTVL |

BCMA_EBB-C1978-A4

| | | |
|---|---|---|
| BCMA_EBB- | 337 | EVQLVESGGGLVQPGGSLRLSCAASGFTFSSYAMSWVRQAPGKGLEWVSA |
| C1978-A4- | | ISGSGGSTYYADSVKGRFTISRDNSKNTLYLQMNSLRAEDTAVYYCAKVE |
| aa | | GSGSLDYWGQGTLVTVSSGGGGSGGGGSGGGGSEIVMTQSPGTLSLSPGE |
| ScFv domain | | RATLSCRASQSVSSAYLAWYQQKPGQPPRLLISGASTRATGIPDRFGGSG |
| | | SGTDFTLTISRLEPEDFAVYYCQHYGSSFNGSSFTFGQGTRLEIK |
| BCMA_EBB- | 358 | GAAGTGCAGCTCGTGGAGTCAGGAGGCGGCCTGGTCCAGCCGGGAGGGTC |
| C1978-A4-nt | | CCTTAGACTGTCATGCGCCGCAAGCGGATTCACTTTCTCCTCCTATGCCA |
| ScFv domain | | TGAGCTGGGTCCGCCAAGCCCCCGGAAAGGGACTGGAATGGGTGTCCGCC |
| | | ATCTCGGGGTCTGGAGGCTCAACTTACTACGCTGACTCCGTGAAGGGACG |
| | | GTTCACCATTAGCCGCGACAACTCCAAGAACACCCTCTACCTCCAAATGA |
| | | ACTCCCTGCGGGCCGAGGATACCGCCGTCTACTACTGCGCCAAAGTGGAA |
| | | GGTTCAGGATCGCTGGACTACTGGGGACAGGGTACTCTCGTGACCGTGTC |
| | | ATCGGGCGGAGGAGGTTCCGGCGGTGGCGGCTCCGGCGGCGGAGGGTCGG |
| | | AGATCGTGATGACCCAGAGCCCTGGTACTCTGAGCCTTTCGCCGGGAGAA |
| | | AGGGCCACCCTGTCCTGCCGCGCTTCCCAATCCGTGTCCTCCGCGTACTT |
| | | GGCGTGGTACCAGCAGAAGCCGGGACAGCCCCCTCGGCTGCTGATCAGCG |
| | | GGGCCAGCACCCGGGCAACCGGAATCCCAGACAGATTCGGGGGTTCCGGC |
| | | AGCGGCACAGATTTCACCCTGACTATTTCGAGGTTGGAGCCCGAGGACTT |
| | | TGCGGTGTATTACTGTCAGCACTACGGGTCGTCCTTTAATGGCTCCAGCC |
| | | TGTTCACGTTCGGACAGGGGACCCGCCTGGAAATCAAG |
| BCMA_EBB- | 379 | EVQLVESGGGLVQPGGSLRLSCAASGFTFSSYAMSWVRQAPGKGLEWVSA |
| C1978-A4-aa | | ISGSGGSTYYADSVKGRFTISRDNSKNTLYLQMNSLRAEDTAVYYCAKVE |
| VH | | GSGSLDYWGQGTLVTVSS |
| BCMA_EBB- | 400 | EIVMTQSPGTLSLSPGERATLSCRASQSVSSAYLAWYQQKPGQPPRLLIS |
| C1978-A4-aa | | GASTRATGIPDRFGGSGSGTDFTLTISRLEPEDFAVYYCQHYGSSFNGSS |
| VL | | LFTFGQGTRLEIK |

BCMA_EBB-C1978-G1

| | | |
|---|---|---|
| BCMA_EBB- | 338 | EVQLVETGGGLVQPGGSLRLSCAASGITFSRYPMSWVRQAPGKGLEWVSG |
| C1978-G1- | | ISDSGVSTYYADSAKGRFTISRDNSKNTLFLQMSSLRDEDTAVYYCVTRA |
| aa | | GSEASDIWGQGTMVTVSSGGGGSGGSGSGGGGSEIVLTQSPATLSLSPGE |
| ScFv domain | | RATLSCRASQSVSNSLAWYQQKPGQAPRLLIYDASSRATGIPDRFSGSGS |
| | | GTDFTLTISRLEPEDFAIYYCQQFGTSSGLTFGGGTKLEIK |

| | | |
|---|---|---|
| BCMA_EBB- | 359 | GAAGTGCAACTGGTGGAAACCGGTGGCGGCCTGGTGCAGCCTGGAGGATC |
| Cl978-G1- | | ATTGAGGCTGTCATGCGCGGCCAGCGGTATTACCTTCTCCCGGTACCCCA |
| nt | | TGTCCTGGGTCAGACAGGCCCCGGGGAAAGGGCTTGAATGGGTGTCCGGG |
| ScFv domain | | ATCTCGGACTCCGGTGTCAGCACTTACTACGCCGACTCCGCCAAGGGACG |
| | | CTTCACCATTTCCCGGGACAACTCGAAGAACACCCTGTTCCTCCAAATGA |
| | | GCTCCCTCCGGGACGAGGATACTGCAGTGTACTACTGCGTGACCCGCGCC |
| | | GGGTCCGAGGCGTCTGACATTTGGGGACAGGGCACTATGGTCACCGTGTC |
| | | GTCCGGCGGAGGGGGCTCGGGAGGCGGTGGCAGCGGAGGAGGAGGGTCCG |
| | | AGATCGTGCTGACCCAATCCCCGGCCACCCTCTCGCTGAGCCCTGGAGAA |
| | | AGGGCAACCTTGTCCTGTCGCGCGAGCCAGTCCGTGAGCAACTCCCTGGC |
| | | CTGGTACCAGCAGAAGCCCGGACAGGCTCCGAGACTTCTGATCTACGACG |
| | | CTTCGAGCCGGGCCACTGGAATCCCCGACCGCTTTTCGGGGTCCGGCTCA |
| | | GGAACCGATTTCACCCTGACAATCTCACGGCTGGAGCCAGAGGATTTCGC |
| | | CATCTATTACTGCCAGCAGTTCGGTACTTCCTCCGGCCTGACTTTCGGAG |
| | | GCGGCACGAAGCTCGAAATCAAG |
| BCMA_EBB- | 380 | EVQLVETGGGLVQPGGSLRLSCAASGITFSRYPMSWVRQAPGKGLEWVSG |
| C1978-G1-aa | | ISDSGVSTYYADSAKGRFTISRDNSKNTLFLQMSSLRDEDTAVYYCVTRA |
| VH | | GSEASDIWGQGTMVTVSS |
| BCMA_EBB- | 401 | EIVLTQSPATLSLSPGERATLSCRASQSVSNSLAWYQQKPGQAPRLLIYD |
| C1978-G1-aa | | ASSRATGIPDRFSGSGSGTDFTLTISRLEPEDFAIYYCQQFGTSSGLTFG |
| VL | | GGTKLEIK |

BCMA_EBB-C1979-C1

| | | |
|---|---|---|
| BCMAI_EBB- | 339 | QVQLVESGGGLVQPGGSLRLSCAASGFTFSSYAMSWVRQAPGKGLEWVSA |
| C1979-C1- | | ISGSGGSTYYADSVKGRFTISRDNAKNSLYLQMNSLRAEDTAIYYCARAT |
| aa | | YKRELRYYYGMDVWGQGTMVTVSSGGGGSGGGGSGGGGSEIVMTQSPGTV |
| ScFv domain | | SLSPGERATLSCRASQSVSSSFLAWYQQKPGQAPRLLIYGASSRATGIPD |
| | | RFSGSGSGTDFTLTISRLEPEDSANYYCQQYHSSPSWTFGQGTRLEIK |
| BCMA_EBB- | 360 | CAAGTGCAGCTCGTGGAATCGGGTGGCGGACTGGTGCAGCCGGGGGGCTC |
| C1979-C1-nt | | ACTTAGACTGTCCTGCGCGGCCAGCGGATTCACTTTcTCCTCCTACGCCA |
| ScFv domain | | TGTCCTGGGTCAGACAGGCCCCTGGAAAGGGCCTGGAATGGGTGTCCGCA |
| | | ATCAGCGGCAGCGGCGGCTCGACCTATTACGCGGATTCAGTGAAGGGCAG |
| | | ATTCACCATTTCCCGGGACAACGCCAAGAACTCCTTGTACCTTCAAATGA |
| | | ACTCCCTCCGCGCGGAAGATACCGCAATCTACTACTGCGCTCGGGCCACT |
| | | TACAAGAGGGAACTGCGCTACTACTACGGGATGGACGTCTGGGGCCAGGG |
| | | AACCATGGTCACCGTGTCCAGCGGAGGAGGAGGATCGGGAGGAGGCGGTA |
| | | GCGGGGGTGGAGGGTCGGAGATCGTGATGACCCAGTCCCCCGGCACTGTG |
| | | TCGCTGTCCCCCGGCGALCGGGCCACCCTGTCATGTCGGGCCAGCCAGTC |
| | | AGTGTCGTCAAGCTTCCTCGCCTGGTACCAGCAGAAACCGGGACAAGCTC |
| | | CCCGCCTGCTGATCTACGGAGCCAGCAGCCGGGCCACCGGTATTCCTGAC |
| | | CGGTTCTCCGGTTCGGGGTCCGGGACCGACTTTACTCTGACTATCTCTCG |
| | | CCTCGAGCCAGAGGACTCCGCCGTGTATTACTGCCAGCAGTACCACTCCT |
| | | CCCCGTCCTGGACGTTCGGACAGGGCACAAGGCTGGAGATTAAG |
| BCMA_EBB- | 381 | QVQLVESGGGLVQPGGSLRLSCAASGFTFSSYAMSWVRQAPGKGLEWVSA |
| C1979-C1-aa | | ISGSGGSTYYADSVKGRFTISRDNAKNSLYLQMNSLRAEDTAIYYCARAT |
| VH | | YKRELRYYYGMDVWGQGTMVTVSS |
| BCMA_EBB- | 402 | EIVMTQSPGTVSLSPGERATLSCRASQSVSSSFLAWYQQKPGQAPRLLIY |
| C1979-C1-aa | | GASSRATGIPDRFSGSGSGTDFTLTISRLEPEDSAVYYCQQYHSSPSWTF |
| VL | | GQGTRLEIK |

BCMA_EBB-C1978-C7

| | | |
|---|---|---|
| BCMA_EBB- | 340 | EVQLVETGGGLVQPGGSLRLSCAASGFTFSSYAMSWVRQAPGKGLEWVSA |
| C1978-C7- | | ISGSGGSTYYADSVEGRFTISRDNSKNTLYLQMNTLKAEDTAVYYCARAT |
| aa | | YKRELRYYYGMDVWGQGTTVTVSSGGGGSGGGGSGGGGSEIVLTQSPSTL |
| ScFv domain | | SLSPGESATLSCRASQSVSTTFLAWYQQKPGQAPRLLIYGSSNRATGIPD |
| | | RFSGSGSGTDFTLTIRRLEPEDFAVYYCQQYHSSPSWTFGQGTKVEIK |
| BCMA_EBB- | 361 | GAGGTGCAGCTTGTGGALACCGGTGGCGGACTGGTGCAGCCCGGAGGAAG |
| C1978-C7-nt | | CCTCAGGCTGTCCTGCGCCGCGTCCGGCTTCACCTTCTCCTCGTACGCCA |
| ScFv domain | | TGTCCTGGGTCCGCCAGGCCCCCGGAAAGGGCCTGGAATGGGTGTCCGCC |
| | | ATCTCTGGAAGCGGAGGTTCCACGTACTACGCGGACAGCGTCAAGGGAAG |
| | | GTTCACAATCTCCCGCGATAATTCGAAGAACACTCTGTACCTTCAAATGA |
| | | ACACCCTGAAGGCCGAGGACACTGCTGTGTACTACTGCGCACGGGCCACC |
| | | TACAAGAGAGAGCTCCGGTACTACTACGGAATGGACGTCTGGGGCCAGGG |
| | | AACTACTGTGACCGTGTCCTCGGGAGGGGGTGGCTCCGGGGGGGGCGGCT |
| | | CCGGCGGAGGCGGTTCCGAGATTGTGCTGACCCAGTCACCTTCAACTCTG |
| | | TCGCTGTCCCCGGGAGAGAGCGCTACTCTGAGCTGCCGGGCCAGCCAGTC |
| | | CGTGTCCACCACCTTCCTCGCCTGGTATCAGCAGAAGCCGGGGCAGGCAC |
| | | CACGGCTCTTGATCTACGGGTCAAGCAACAGAGCGACCGGAATTCCTGAC |
| | | CGCTTCTCGGGGAGCGGTTCAGGCACCGACTTCACCCTGACTATCCGGCG |
| | | CCTGGAACCCGAAGATTTCGCCGTGTATTACTGTCAACAGTACCACTCCT |
| | | CGCCGTCCTGGACCTTTGGCCAAGGAACCAAAGTGGAAATCAAG |
| BCMA_EBB- | 382 | EVQLVETGGGLVQPGGSLRLSCAASGFTFSSYAMSWVRQAPGKGLEWVSA |
| C1978-C7-aa | | ISGSGGSTYYADSVKGRFTISRDNSKNTLYLQMNTLKAEDTAVYYCARAT |
| VH | | YKRELRYYYGMDVWGQGTTVTVSS |
| BCMA_EBB- | 403 | EIVLTQSPSTLSLSPGESATLSCRASQSVSTTFLAWYQQKPGQAPRLLIY |
| C1978-C7-aa | | GSSNRATGIPDRFSGSGSGTDFTLTIRRLEPEDFAVYYCQQYHSSPSWTF |
| VL | | GQGTKVEIK |

BCMA_EBB-C1978-D10

| | | |
|---|---|---|
| BCMA_EBB- | 341 | EVQLVETGGGLVQPGRSLRLSCAASGFTFDDYAMHWVRQAPGKGLEWVSG |
| C1978-D10- | | ISWNSGSIGYADSVKGRFTISRDNAKNSLYLQMNSLRDEDTAVYYCARVG |
| aa | | KAVPDVWGQGTTVTVSSGGGGSGGGGSGGGGSDIVMTQTPSSLSASVGDR |
| ScFv domain | | VTITCPASQSISSYLNWYQQKPGKAPKLLIYAASSLQSGVPSRFSGSGSG |
| | | TDEFLTISSLQPEDFATYYCQQSYSTPYSFGQGTRLEIK |
| BCMA_EBB- | 362 | GAAGTGCAGCTCGTGGAAACTGGAGGTGGACTCGTGCAGCCTGGACGGTC |
| C1978-D10- | | GCTGCGGCTGAGCTGCGCTGCATCCGGCTTCACCTTCGACGATTATGCCA |
| nt | | TGCACTGGGTCAGACAGGCGCCAGGGAAGGGACTTGAGTGGGTGTCCGGT |
| ScFv domain | | ATCAGCTGGAATAGCGGCTCAATCGGATACGCGGACTCCGTGAAGGGAAG |
| | | GTTCACCATTTCCCGCGACAACGCCAAGAACTCCCTGTACTTGCAAATGA |
| | | ACAGCCTCCGGGATGAGGACACTGCCGTGTACTACTGCGCCCGCGTCGGA |
| | | AAAGCTGTGCCCGACGTCTGGGGCCAGGGAACCACTGTGACCGTGTCCAG |
| | | CGGCGGGGGTGGATCGGGCGGTGGAGGGTCCGGTGGAGGGGGCTCAGATA |
| | | TTGTGATGACCCAGACCCCCTCGTCCCTGTCCGCCTCGGTCGGCGACCGC |
| | | GTGACTATCACATGTAGAGCCTCGCAGAGCATCTCCAGCTACCTGAACTG |
| | | GTATCAGCAGAAGCCGGGGAAGGCCCCGAAGCTCCTGATCTACGCGGCAT |
| | | CATCACTGCAATCGGGAGTGCCGAGCCGGTTTTCCGGGTCCGGCTCCGGC |
| | | ACCGACTTCACGCTGACCATTTCTTCCCTGCAACCCGAGGACTTCGCCAC |
| | | TTACTACTGCCAGCAGTCCTACTCCACCCCTTACTCCTTCGGCCAAGGAA |
| | | CCAGGCTGGAAATCAAG |
| BCMA_EBB- | 383 | EVQLVETGGGLVQPGRSLRLSCAASGFTFDDYAMHWVRQAPGKGLEWVSG |
| C1978-D10-aa | | ISWNSGSIGYADSVEGRFTISRDNAKNSLYLQMNSLRDEDTAVYYCARVG |
| VH | | KAVPDVWGQGTTVTVSS |
| BCMA_EBB- | 404 | DIVMTQTPSSLSASVGDRVTITCRASQSISSYLNWYQQKPGNAPKLLIYA |
| C1978-D10-aa | | ASSLQSGVPSRFSGSGSGTDFTLTISSLQPEDFATYYCQQSYSTPYSFGQ |
| VL | | GTRLEIK |

BCMA_EBB-C1979-C12

| | | |
|---|---|---|
| BCMA_EBB- | 342 | EVQLVESGGGLVQPGRSLRLSCTASGFTFDDYAMHWVRQRPGKGLEWVAS |
| C1979-C12- | | INWKGNSLAYGDSVKGRFAISRDNAKNTVFLQMNSLRTEDTAVYYCASHQ |
| aa | | GVAYYNYAMDVWGRGTLVTVSSGGGGSGGGGSGGGGSEIVLTQSPGTLSL |
| ScFv domain | | SPGERATLSCRATQSIGSSFLAWYQQRPGQAPRLLIYGASQRATGIPDRF |
| | | SGRGSGTDFTLTISRVEPEDSAVYYCQHYESSPSWTFGQGTKVEIK |
| BCMA_EBB- | 363 | GAAGTGCAGCTCGTGGAGAGCGGGGGAGGATTGGTGCAGCCCGGAAGGTC |
| C1979-C12- | | CCTGCGGCTCTCCTGCACTGCGTCTGGCTTCACCTTCGACGACTACGCGA |
| nt | | TGCACTGGGTCAGACAGCGCCCGGGAAAGGGCCTGGAATGGGTCGCCTCA |
| ScFv domain | | ATCAACTGGAAGGGAAACTCCCTGGCCTATGGCGACAGCGTGAAGGGCCG |
| | | CTTCGCCATTTCGCGCGACAACGCCAAGAACACCGTGTTTCTGCAAATGA |
| | | ATTCCCTGCGGACCGAGGATACCGCTGTGTACTACTGCGCCAGCCACCAG |
| | | GGCGTGGCATACTATAACTACGCCATGGACGTGTGGGGAAGAGGGACGCT |
| | | CGTCACCGTGTCCTCCGGGGGCGGTGGATCGGGTGGAGGAGGAAGCGGTG |
| | | GCGGGGGCAGCGAAATCGTGCTGACTCAGAGCCCGGGAACTCTTTCACTG |
| | | TCCCCGGGAGAACGGGCCACTCTCTCGTGCCGGGCCACCCAGTCCATCGG |
| | | CTCCTCCTTCCTTGCCTGGTACCAGCAGAGGCCAGGACAGGCGCCCCGCC |
| | | TGCTGATCTACGGTGCTTCCCAACGCGCCACTGGCATTCCTGACCGGTTC |
| | | AGCGGCAGAGGGTCGGGAACCGATTTCACACTGACCATTTCCCGGGTGGA |
| | | GCCCGAAGATTCGGCAGTCTACTACTGTCAGCATTACGAGTCCTCCCCTT |
| | | CATGGACCTTCGGTCAAGGGACCAAAGTGGAGATCAAG |
| BCMA_EBB- | 384 | EVQLVESGGGLVQPGRSLRLSCTASGFTFDDYAMHWVRQRPGKGLEWVAS |
| C1979-C12-aa | | INWKGNSLAYGDSVKGRFAISRDNAKNTVFLQMNSLRTEDTAVYYCASHQ |
| VH | | GVAYYNYAMDVWGRGTLVTVSS |
| BCMA_EBB- | 405 | EIVLTQSPGTLSLSPGERATLSCRATQSIGSSFLAWYQQRPGQAPRLLIY |
| C1979-C12-aa | | GASQRATGIPDRFSGRGSGTDFTLTISRVEPEDSAVYYCQHYESSPSWTF |
| VL | | GQGTKVEIK |

BCMA_EBB-C1980-G4

| | | |
|---|---|---|
| BCMA_EBB- | 343 | EVQLVESGGGLVQPGGSLRLSCAASGFTFSSYAMSWVRQAPGKGLEWVSA |
| C1980-G4-aa | | ISGSGGSTYYADSVKGRFTISRDNSKNTLYLQMNSLRAEDTAVYYCAKVV |
| ScFv domain | | RDGMDVWGQGTTVTVSSGGGGSGGGGSGGGGSEIVLTQSPATLSLSPGER |
| | | ATLSCRASQSVSSSYLAWYQQKPGQAPRLLIYGASSRATGIPDRFSGNGS |
| | | GTDFTLTISRLEPEDFAVYYCQQYGSPPRFTFGPGTKVDIK |
| BCMA_EBB- | 364 | GAGGTGCAGTTGGTCGAAAGCGGGGGCGGGCTTGTGCAGCCTGGCGGATC |
| C1980-G4-nt | | ACTGCGGCTGTCCTGCGCGGCATCAGGCTTCACGTTTTCTTCCTACGCCA |
| ScFv domain | | TGTCCTGGGTGCGCCAGGCCCCTGGAAAGGGACTGGAATGGGTGTCCGCG |
| | | ATTTCGGGGTCCGGCGGGAGCACCTACTACGCCGATTCCGTGAAGGGCCG |
| | | CTTCACTATCTCGCGGGACAACTCCAAGAACACCCTCTACCTCCAAATGA |
| | | ATAGCCTGCGGGCCGAGGATACCGCCGTCTACTATTGCGCTAAGGTCGTG |
| | | CGCGACGGAATGGACGTGTGGGGACAGGGTACCACCGTGACAGTGTCCTC |
| | | GGGGGGAGGCGGTAGCGGCGGAGGAGGAAGCGGTGGTGGAGGTTCCGAGA |
| | | TTGTGCTGACTCAATCACCCGCGACCCTGAGCCTGTCCCCCGGCGAAAGG |
| | | GCCACTCTGTCCTGTCGGGCCAGCCAATCAGTCTCCTCCTCGTACCTGGC |
| | | CTGGTACCAGCAGLAGCCAGGACAGGCTCCGAGACTCCTTATCTATGGCG |
| | | CATCCTCCCGCGCCACCGGAATCCCGGATAGGTTCTCGGGAAACGGATCG |
| | | GGGACCGACTTCACTCTCACCATcTCCCGGCTGGAACCGGAGGACTTCGC |
| | | CGTGTACTACTGCCAGCAGTACGGCAGCCCGCCTAGATTCACTTTCGGCC |
| | | CCGGCACCALAAGTGGACATCAAG |
| BCMA_EBB- | 385 | EVQLVESGGGLVQPGGSLRLSCAASGFTFSSYAMSWVRQAPGKGLEWVSA |
| C1980-G4-aa | | ISGSGGSTYYADSVEGRFTISRDNSKNTLYLQMNSLRAEDTAVYYCAKVV |
| VH | | RDGMDVWGQGTTVTVSS |
| BCMA_EBB- | 406 | EIVLTQSPATLSLSPGERATLSCRASQSYSSSYLAWYQQKPGQAPRLLIY |
| C1980-G4-aa | | GASSRATGIPDRFSGNGSGTDFTLTISRLEPEDFAVYYCQQYGSPPRFTF |
| VL | | GPGTKVDIK |

BCMA_EBB-C1980-D2

| | | |
|---|---|---|
| BCMA_EBB- | 344 | EVQLLESGGGLVQPGGSLRLSCAASGFTFSSYAMSWVRQAPGKGLEWVSA |
| C1980-D2-aa | | ISGSGGSTYYADSVKGRFTISRDNSKNTLYLQMNSLRAEDTAVYYCAKIP |
| ScFv domain | | QTGTFDYWGQGTLVTVSSGGGGSGGGGSGGGGSEIVLTQSPGTLSLSPGE |
| | | RATLSCRASQSVSSSYLAWYQQRPGQAPRLLIYGASSRATGIPDRFSGSG |
| | | SGTDFTLTISRLEPEDFAVYYCQHYGSSPSWTFGQGTRLEIK |
| BCMA_EBB- | 365 | GAAGTGCAGCTGCTGGAGTCCGGCGGTGGATTGGTGCAACCGGGGGGATC |
| C198-D2-nt | | GCTCAGACTGTCCTGTGCGGCGTCAGGCTTCACCTTCTCGAGCTACGCCA |
| ScFv domain | | TGTCATGGGTCAGACAGGCCCCTGGAAAGGGTCTGGAATGGGTGTCCGCC |
| | | ATTTCCGGGAGCGGGGGATCTACATACTACGCCGATAGCGTGAAGGGCCG |
| | | CTTCACCATTTCCCGGGACAACTCCAAGAACACTCTCTATCTGCAAATGA |
| | | ACTCCCTCCGCGCTGAGGACACTGCCGTGTACTACTGCGCCAAAATCCCT |
| | | CAGACCGGCACCTTCGACTACTGGGGACAGGGGACTCTGGTCACCGTCAG |
| | | CAGCGGTGGCGGAGGTTCGGGGGGAGGAGGAAGCGGCGGCGGAGGGTCCG |
| | | AGATTGTGCTGACCCAGTCACCCGGCACTTTGTCCCTGTCGCCTGGAGAA |
| | | AGGGCCACCCTTTCCTGCCGGGCATCCCAATCCGTGTCCTCCTCGTACCT |
| | | GGCCTGGTACCAGCAGAGGCCCGGACAGGCCCCACGGCTTCTGATCTACG |
| | | GAGCAAGCAGCCGCGCGACCGGTATCCCGGACCGGTTTTCGGGCTCGGGC |
| | | TCAGGAACTGACTTCACCCTCACCATCTCCCGCCTGGAACCCGAAGATTT |
| | | CGCTGTGTATTACTGCCAGCACTACGGCAGCTCCCCGTCCTGGACGTTCG |
| | | GCCAGGGAACTCGGCTGGAGATCAAG |
| BCMA_EBB- | 386 | EVQLLESGGGLVQPGGSLRLSCAASGFTFSSYAMSWVRQAPGKGLEWVSA |
| C1980-D2-aa | | ISGSGGSTYYADSVKGRFTISRDNSKNTLYLQMNSLRAEDTAVYYCAKIP |
| VH | | QTGTFDYWGQGTLVTVSS |
| BCMA_EBB- | 407 | EIVLTQSPGTLSLSPGERATLSCRASQSVSSSYLAWYQQRPGQAPRLLIY |
| C1980-D2-aa | | GASSRATGIPDRFSGSGSGTDFTLTISRLEPEDFAVYYCQHYGSSPSWTF |
| VL | | GQGTRLEIK |

BCMA_EBB-C1978-A10

| | | |
|---|---|---|
| BCMA_EBB- | 345 | EVQLVETGGGLVQPGGSLRLSCAASGFTFSSYAMSWVRQAPGKGLEWVSA |
| C1978-A10- | | ISGSGGSTYYADSVKGRFTMSRENDKNSVFLQMNSLRVEDTGVYYCARAN |
| aa | | YKRELRYYYGMDVWGQGTMVTVSSGGGGSGGGGSGGGGSEIVMTQSPGTL |
| ScFv domain | | SLSPGESATLSCRASQRVASNYLAWYQHKPGQAPSLLISGASSRATGVPD |
| | | RFSGSGSGTDFTLAISRLEPEDSAVYYCQHYDSSPSWTFGQGTKVEIK |
| BCMA_EBB- | 366 | GAAGTGCAACTGGTGGAAACCGGTGGAGGACTCGTGCAGCCTGGCGGCAG |
| C1978-A10- | | CCTCCGGCTGAGCTGCGCCGCTTCGGGATTCACCTTTTCCTCCTACGCGA |
| nt | | TGTCTTGGGTCAGACAGGCCCCCGGAAAGGGGCTGGAATGGGTGTCAGCC |
| ScFv domain | | ATCTCCGGCTCCGGCGGATCAACGTACTACGCCGACTCCGTGAAAGGCCG |
| | | GTTCACCATGTCGCGCGAGAATGACAAGAACTCCGTGTTCCTGCAAATGA |
| | | ACTCCCTGAGGGTGGAGGACACCGGAGTGTACTATTGTGCGCGCGCCAAC |
| | | TACAAGAGAGAGCTGCGGTACTACTACGGAATGGACGTCTGGGGACAGGG |
| | | AACTATGGTGACCGTGTGATCCGGTGGAGGGGGAAGCGGCGGTGGAGGCA |
| | | GCGGGGGCGGGGGTTCAGAAATTGTCATGACCCAGTCCCCGGGAACTCTT |
| | | TCCCTCTCCCCCGGGGAATCCGCGACTTTGTCCTGCCGGGCCAGCCAGCG |
| | | CGTGGCCTCGAACTACCTCGCATGGTACCAGCATAAGCCAGGCCAAGCCC |
| | | CTTCCCTGCTGATTTCCGGGGCTAGCAGCCGCGCCACTGGCGTGCCGGAT |
| | | AGGTTCTCGGGAAGCGGCTCGGGTACCGATTTCACCCTGGCAATCTCGCG |
| | | GCTGGAACCGGAGGATTCGGCCGTGTACTACTGCCAGCACTATGACTCAT |
| | | CCCCCTCCTGGACATTCGGACAGGGCACCAAGGTCGAGATCAAG |
| BCMA_EBB- | 387 | EVQLVETGGGLVQPGGSLRLSCAASGFTFSSYAMSWVRQAPGKGLEWVSA |
| C1978-A10-aa | | ISGSGGSTYYADSVKGRFTMSRENDKNSVFLQMNSLRVEDTGVYYCARAN |
| VH | | YKRELRYYYGMDVWGQGTMVTVSS |
| BCMA_EBB-aa | 408 | EIVMTQSPGTLSLSPGESATLSCRASQRVASNYLAWYQHKPGQAPSLLIS |
| C1978-410- | | GASSRATGVPDRESGSGSGTDFTLAISRLEPEDSAVYYCQHYDSSPSWTF |
| VL | | GQGTKVEIK |

BCMA_EBB-C1978-D4

| | | |
|---|---|---|
| BCMA_EBB- | 346 | EVQLLETGGGLVQPGGSLRLSCAASGFSFSSYAMSWVRQAPGKGLEWVSA |
| C1978-D4-aa | | ISGSGGSTYYADSVKGRFTISRDNSKNTLYLQMNSLRAEDTAVYYCAKAL |
| ScFv domain | | VGATGAFDIWGQGTLNTVSSGGGGSGGGGSGGGGSEIVLTQSPGTLSLSP |
| | | GERATLSCRASQSLSSNFLAWYQQKPGQAPGLLIYGASNWATGTPDRFSG |
| | | SGSGTDFTLTITRLEPEDFAVYYCQYYGTSPMYTFGQGTKVEIK |
| BCMA_EBB- | 367 | GAAGTGCAGCTGCTCGAAACCGGTGGAGGGCTGGTGCAGCCAGGGGGCTC |
| C1978-D4-nt | | CCTGAGGCTTTCATGCGCCGCTAGCGGATTCTCCTTCTCCTCTTACGCCA |
| ScFv domain | | TGTCGTGGGTCCGCCAAGCCCCTGGAALAGGCCTGGLATGGGTGTCCGCG |
| | | ATTTCCGGGAGCGGAGGTTCGACCTATTACGCCGACTCCGTGAAGGGCCG |
| | | CTTTACCATCTCCCGGGATAACTCCAAGAACACTCTGTACCTCCAAATGA |
| | | ACTCGCTGAGAGCCGAGGACACCGCCGTGTATTACTGCGCGAAGGCGCTG |
| | | GTCGGCGCGACTGGGGCATTCGACATCTGGGGACAGGGAACTCTTGTGAC |
| | | CGTGTCGAGCGGAGGCGGCGGCTCCGGCGGAGGAGGGAGCGGGGGCGGTG |
| | | GTTCCGAAATCGTGTTGACTCAGTCCCCGGGAACCCTGAGCTTGTCACCC |
| | | GGGGAGCGGGCCACTCTCTCCTGTCGCGCCTCCCAATCGCTCTCATCCAA |
| | | TTTCCTGGCCTGGTACCAGCAGAAGCCCGGACAGGCCCCGGGCCTGCTCA |
| | | TCTACGGCGCTTCLAACTGGGCAACGGGAACCCCTGATCGGTTCAGCGGA |
| | | AGCGGATCGGGTACTGACTTTACCCTGACCATCACCAGACTGGAACCGGA |
| | | GGACTTCGCCGTGTACTACTGCCAGTACTACGGCACCTCCCCCATGTACA |
| | | CATTCGGACAGGGTACCAAGGTCGAGATTAAG |
| BCMA_EBB- | 388 | EVQLLETGGGLVQPGGSLRLSCAASGFSFSSYAMSWVRQAPGKGLEWVSA |
| C1978-D4-aa | | ISGSGGSTYYADSVKGRFTISRDNSKNTLYLQMNSLRAEDTAVYYCAKAL |
| VH | | VGATGAFDIWGQGTLVTVSS |
| BCMA_EBB- | 409 | EIVLTQSPGTLSLSPGERATLSCRASQSLSSNFLAWYQQKPGQAPGLLIY |
| C1978-D4-aa | | GASNWATGTPDRFSGSGSGTDFTLTITRLEPEDFAVYYCQYYGTSPMYTF |
| VL | | GQGTKVEIK |

BCMA_EBB-C1980-A2

| | | |
|---|---|---|
| BCMA_EBB- | 347 | EVQLLESGGGLVQPGGSLRLSCAASGFTFSSYAMSWVRQAPGKGLEWVSA |
| C1980-A2-aa | | ISGSGGSTYYADSVKGRFTISRDNSKNTLYLQMNSLRAEDTAVYYCVLWF |
| ScFv domain | | GEGFDPWGQGTLVTVSSGGGGSGGGGSGGGGSDIVLTQSPLSLPVTPGEP |
| | | ASISCRSSQSLLHSNGYNYLDWYLQKPGQSPQLLIYLGSNRASGVPDRFS |
| | | GSGSGTDFTLKISRVEAEDVGVYYCMQALQTPLTFGGGTKVDIN |
| BCMA_EBB- | 368 | GAAGTGCAGCTGCTTGAGAGCGGTGGAGGTCTGGTGCAGCCCGGGGGATC |
| C1980-A2-nt | | ACTGCGCCTGTCCTGTGCCGCGTCCGGTTTCACTTTCTCCTCGTACGCCA |
| ScFv domain | | TGTCGTGGGTCAGACAGGCACCGGGAAAGGGACTGGAATGGGTGTCAGCC |
| | | ATTTCGGGTTCGGGGGGCAGCACCTACTACGCTGACTCCGTGAAGGGCCG |
| | | GTTCACCATTTCCCGCGACAACTCCLAGAACACCTTGTACCTCCAAATGA |
| | | ACTCCCTGCGGGCCGAAGATACCGCCGTGTATTACTGCGTGCTGTGGTTC |
| | | GGAGAGGGATTCGACCCGTGGGGACAAGGAACACTCGTGACTGTGTCATC |
| | | CGGCGGAGGCGGCAGCGGTGGCGGCGGTTCCGGCGGCGGCGGATCTGACA |
| | | TCGTGTTGACCCAGTCCCCTCTGAGCCTGCCGGTCACTCCTGGCGAACCA |
| | | GCCAGCATCTCCTGCCGGTCGAGCCAGTCCCTCCTGCACTCCAATGGGTA |
| | | CAACTACCTCGATTGGTATCTGCAALAGCCGGGCCAGAGCCCCCAGCTGC |
| | | TGATCTACCTTGGGTCAAACCGCGCTTCCGGGGTGCCTGATAGATTCTCC |
| | | GGGTCCGGGAGCGGAACCGACTTTACCCTGAAAATCTCGAGGGTGGAGGC |
| | | CGAGGACGTCGGAGTGTACTACTGCATGCAGGCGCTCCAGACTCCCCTGA |
| | | CCTTCGGAGGAGGAACGAAGGTCGACATCAAGA |
| BCMA_EBB- | 389 | EVQLLESGGGLVQPGGSLRLSCAASGFTFSSYAMSWVRQAPGKGLEWVSA |
| C1980-A2-aa | | ISGSGGSTYYADSVEGRFTISRDNSKNTLYLQMNSLRAEDTAVYYCVLWF |
| VH | | GEGFDPWGQGTLVTVSS |
| BCMA_EBB- | 410 | DIVLTQSRLSLPVTPGEPASISCRSSQSLLHSNGYNYLDWYLQKPGQSPQ |
| C1980-A2-aa | | LLIYLGSNRASGVPDRFSGSGSGTDFTLKISRVEAEDVGVYYCMQALQTP |
| VL | | LTFGGGTKVDIK |

BCMA_EBB-C1981-C3

| | | |
|---|---|---|
| BCMA_EBB- | 348 | QVQLVESGGGLVQPGGSLRLSCAASGFTFSSYAMSWVRQAPGKGLEWVSA |
| C1981-C3-aa | | ISGSGGSTYYADSVKGRFTISRDNSKNTLYLQMNSLRAEDTAVYYCAKVG |
| ScFv domain | | YDSSGYYRDYYGMDVWGQGTTVTVSSGGGGSGGGGSGGGGSEIVLTQSPG |
| | | TLSLSPGERATLSCRASQSVSSSYLAWYQQKPGQAPRLLIYGTSSRATGI |
| | | SDRFSGSGSGTDFTLTISRLEPEDFAVYYCQHYGNSPPKFTFGPGTKLEI |
| | | K |
| BCMA_EBB- | 369 | CAAGTGCAGCTCGTGGAGTCAGGCGGAGGACTGGTGCAGCCCGGGGGCTC |
| C1981-C3-nt | | CCTGAGACTTTCCTGCGCGGCATCGGGTTTTACCTTCTCCTCCTATGCTA |
| ScFv domain | | TGTCCTGGGTGCGCCAGGCCCCGGGAAAGGGACTGGAATGGGTGTCCGCA |
| | | ATCAGCGGTAGCGGGGGCTCAACATACTACGCCGACTCCGTCAAGGGTCG |
| | | CTTCACTATTTCCCGGGACAACTCCAAGAATACCCTGTACCTCCAAATGA |
| | | ACAGCCTCAGGGCCGAGGATACTGCCGTGTACTACTGCGCCAAAGTCGGA |
| | | TACGATAGCTCCGGTTACTACCGGGACTACTACGGAATGGACGTGTGGGG |
| | | ACAGGGCACCACCGTGACCGTGTCAAGCGGCGGAGGCGGTTCAGGAGGGG |
| | | GAGGCTCCGGCGGTGGAGGGTCCGAAATCGTCCTGACTCAGTCGCCTGGC |
| | | ACTCTGTCGTTGTCCCCGGGGGAGCGCGCTACCCTGTCGTGTCGGGCGTC |
| | | GCAGTCCGTGTCGAGCTCCTACCTCGCGTGGTACCAGCAGAAGCCCGGAC |
| | | AGGCCCCTAGACTTCTGATCTACGGCACTTCTTCACGCGCCACCGGGATC |
| | | AGCGACAGGTTCAGCGGCTCCGGCTCCGGGACCGACTTCACCCTGACCAT |
| | | TAGCCGGCTGGAGCCTGAAGATTTCGCCGTGTATTACTGCCAACACTACG |
| | | GAAACTCGCCGCCAAAGTTCACGTTCGGACCCGGAACCAAGCTGGAAATC |
| | | AAG |
| BCMA_EBB- | 390 | QVQLVESGGGLVQPGGSLRLSCAASGFTFSSYAMSWVRQAPGKGLEWVSA |
| C1981-C3-aa | | ISGSGGSTYYADSVKGRFTISRDNSKNTLYLQMNSLRAEDTAVYYCAKVG |
| VH | | YDSSGYYRDYYGMDVWGQGTTVTVSS |
| BCMA_EBB- | 411 | EIVLTQSPGTLSLSPGERATLSCRASQSVSSSYLAWYQQKPGQAPRLLIY |
| C1981-C3-aa | | GTSSRATGISDRFSGSGSGTDFTLTISRLEPEDFAVYYCQHYGNSPPKFT |
| VL | | FGPGTKLEIK |

BCMA_EBB-C1978-G4

| | | |
|---|---|---|
| BCMA_EBB- | 349 | EVQLVESGGGLVQPGGSLRLSCAASGFTFSSYAMSWVRQAPGKGLEWVSA |
| C1978-G4-aa | | ISGSGGSTYYADSVKGRFTISRDNSKNTLYLQMNSLRAEDTAVYYCAKMG |
| ScFv domain | | WSSGYLGAFDTWGQGTTVTVSSGGGGSGGGGSGGGGSEIVLTQSPGTLSL |
| | | SPGERATLSCRASQSVASSFLAWYQQKPGQAPRLLIYGASGRATGIPDRF |
| | | SGSGSGTDFTLTISRLEPEDFAVYYCQHYGGSPRLTFGGGTKVDIK |
| BCMA_EBB- | 370 | GAAGTCCAACTGGTGGAGTCCGGGGGAGGGCTCGTGCAGCCCGGAGGCAG |
| C1978-G4-nt | | CCTTCGGCTGTCGTGCGCCGCCTCCGGGTTCACGTTCTGATCCTACGCGA |
| ScFv domain | | TGTCGTGGGTCAGACAGGCACCAGGAAAGGGACTGGAATGGGTGTCCGCC |
| | | ATTAGCGGCTCCGGCGGTAGCACCTACTATGCCGACTCAGTGAAGGGAAG |
| | | GTTCACTATCTCCCGCGACAACAGCAAGAACACCCTGTACCTCCAAATGA |
| | | ACTCTCTGCGGGCCGAGGATACCGCGGTGTACTATTGCGCCAAGATGGGT |
| | | TGGTCCAGCGGATACTTGGGAGCCTTCGACATTTGGGGACAGGGCACTAC |
| | | TGTGACCGTGTCCTCCGGGGGTGGCGGATCGGGAGGCGGCGGCTCGGGTG |
| | | GAGGGGGTTCCGAAATCGTGTTGACCCAGTCACCGGGAACCCTCTCGCTG |
| | | TCCCCGGGAGAACGGGCTACACTGTCATGTAGAGCGTCCCAGTCCGTGGC |
| | | TTCCTCGTTCCTGGCCTGGTACCAGCAGAAGCCGGGACAGGCACCCCGCC |
| | | TGCTCATCTACGGAGCCAGCGGCCGGGCGACCGGCATCCCTGACCGCTTC |
| | | TCCGGTTCCGGCTCGGGCACCGACTTTACTCTGACCATTAGCAGGCTTGA |
| | | GCCCGAGGATTTTGCCGTGTACTACTGCCAACACTACGGGGGGAGCCCTC |
| | | GCCTGACCTTCGGAGGCGGAACTAAGGTCGATATCAAAA |
| BCMA_EBB- | 391 | EVQLVESGGGLVQPGGSLRLSCAASGFTFSSYAMSWVRQAPGKGLEWVSA |
| C1978-G4-aa | | ISGSGGSTYYADSVKGRFTISRDNSKNTLYLQMNSLRAEDTAVYYCAKMG |
| VH | | WSSGYLGADIWGQGTTVTVSS |
| BCMA_EBB- | 412 | EIVLTQSPGTLSLSPGERATLSCPASQSVASSFLAWYQQKPGQAPPLLIY |
| C1978-G4-aa | | GASGRATGIPDRFSGSGSGTDFTLTISRLEPEDFAVYYCQHYGGSPRLTF |
| VL | | GGGTKVDIK |

[0664] In embodiments, additional exemplary BCMA CAR constructs are generated using the CDR and/or VH and VL sequences from PCT Publication WO2012/0163805 (the contents of which are hereby incorporated by reference in its entirety). In embodiments, additional exemplary BCMA CAR constructs are generated using the CDR and/or VH and VL sequences from PCT Publication WO2016/014565 (the contents of which are hereby incorporated by reference in its entirety). In embodiments, additional exemplary BCMA CAR constructs are generated using the CDR and/or VH and VL sequences from PCT Publication WO2014/122144 (the contents of which are hereby incorporated by reference in its entirety). In embodiments, additional exemplary BCMA CAR constructs are generated using the CAR molecules, and/or the VH and VL sequences from PCT Publication WO2016/014789 (the contents of which are hereby incorporated by reference in its entirety). In embodiments, additional exemplary BCMA CAR constructs are generated using the CAR molecules, and/or the VH and VL sequences from PCT Publication WO2014/089335 (the contents of which are hereby incorporated by reference in its entirety). In embodiments, additional exemplary BCMA CAR constructs are generated using the CAR molecules, and/or the VH and VL sequences from PCT Publication WO2014/140248 (the contents of which are hereby incorporated by reference in its entirety).

[0665] In embodiments, additional exemplary BCMA CAR constructs can also be generated using the VH and VL sequences found in Table 9. The amino acid sequences of exemplary scFv domains comprising the VH and VL domains and a linker sequence, and full-length CARs, are in Table 9.

TABLE 9
Additional exemplary BCMA binding domain sequences

| | | SEQ |
|---|---|---|
| | | ID |
| Name | Sequence | NO: |
| A7D12.2 | QIQLVQSGPDLKKPGETVKLSCKASGYTFTNFGMNWVKQAPGKGFKWMAWINTY | 455 |
| VH | TGESYFADDFKGRFAFSVETSATTAYLQINNLKTEDTATYFCARGEIYYGYDGG | |
| | FAYWGQGTLVTVSA | |
| A7D12.2 | DVVMTQSHREMSTSVGDRVSITCRASQDVNTAVSWYQQKPGQSPKLLIFSASYR | 459 |
| VL | YTGVPDRFTGSGSGADFTLTISSVQAEDLAVYYCQQHYSTPWTFGGGTKLDIK | |
| A7D12.2 | QIQLVQSGPDLKKPGETVKLSCKASGYTFTNFGMNWVKQAPGKGFKWMAWINTY | 463 |
| scFv | TGESYEADDEKGRFAFSVETSATTAYLQINNLKTEDTATYFCARGEIYYGYDGG | |
| domain | FAYWGQGTLVTVSAGGGGSGGGGSGGGGSDVVMTQSHRFMSTSVGDRVSITCRA | |
| | SQDVNTAVSWYQQKPGQSPKLLIFSASYRYTGVPDRFTGSGSGADFTLTISSVQ | |
| | AEDLAVYYCQQHYSTPWTFGGGTKLDIK | |
| C11D5.3 | QIQLNQSGPELKKPGETVKISCKASGYTFTDYSINWVKRAPGKGLKWMGWINTE | 456 |
| VH | TREPAYAYDFRGRFAFSLETSASTAYLQINNLKYEDTATYFCALDYSYAMDYWG | |
| | QGTSVTVSS | |
| C11D5.3 | DIVLTQSPASLAMSLGKRATISCRASESVSVIGAHLIHWYQQKPGQPPKLLIYL | 460 |
| VL | ASNLETGVPARFPSGSGSGTDFTLTIDPVEEDDVAIYSCLQSRIFPRTFGGGTKL | |
| | EIK | |
| C11D5.3 | QIQLVQSGPELKKPGETVKISCKASGYTFTDYSINWVKRAPGKGLKWMGWINTE | 464 |
| scFv | TREPAYAYDFRGRFAFSLETSASTAYLQINNLKYEDTATYFCALDYSYAMDYWG | |
| domain | QGTSVTVSSGGGGSGGGGSGGGGSQIQLVQSGPELKKPGETVKISCKASGYTFT | |
| | DYSINWVKRAPGKGLKWMGWINTETREPAYAYDFRGRFAFSLETSASTAYLQIN | |
| | NLKYEDTATYFCALDYSYAMDYWGQGTSVTVSS | |
| C12A3.2 | QIQLVQSGPELKKPGETVKISCKASGYTFRHYSMNWVKQAPGKGLKWMGRINTE | 457 |
| VH | SGVPIYADDFKGRFAFSVETSASTAYLVINNLKDEDTASYFCSNDYLYSLDFWG | |
| | QGTALTVSS | |
| C12A3.2 | DIVLTQSPPSLAMSLGKRATISCRASESVTILGSHLIYWYQQKPGQPPTLLIQL | 461 |
| VL | ASNVQTGVPARFSGSGSRTDFTLTIDPVEEDDVAVYYCLQSRTIPRTFGGGTKL | |
| | EIK | |
| C12A3.2 | QIQLVQSGPELKKPGETVKISCKASGYTFRHYSMNWVKQAPGKGLKWMGRINTE | 465 |
| scFv | SGVPIYADDFKGRFAFSVETSASTAYLVINNLKDEDTASYFCSNDYLYSLDFWG | |
| domain | QGTALTVSSGGGGSGGGGSGGGGSDIVLTQSPPSLAMSLGKRATISCRASESVT | |
| | ILGSHLIYWYQQKPGQPPTLLIQLASNVQTGVPARFSGSGSRTDFTLTIDPVEE | |
| | DDVAVYYCLQSRTIPRTFGGGTKLEIK | |
| C13F12.1 | QIQLVQSGPELKKPGETVKISCKASGYTFTHYSMNWVKQAPGKGLKWMGRINTE | 458 |
| VH | TGEPLYADDFKGRFARSLETSASTAYLVINNLKNEDTATFFCSNDYLYSCDYWG | |
| | QGTTLTVSS | |
| C13F12.1 | DIVLTQSPPSLAMSLGKRATISCRASESVTILGSHLIYWYQQKPGQPPTLLIQL | 462 |
| VL | ASNVQTGVPARFSGSGSRTDFTLTIDPVEEDDVAVYYCLQSRTIPRTFGGGTKL | |
| | EIK | |
| C13F12.1 | QIQLVQSGPELKKPGETVKISCKASGYTFTHYSMNWVKQAPGKGLKWMGRINTE | 466 |
| scFv | TGEPLYADDFKGRFAFSLETSASTAYLVINNLKNEDTATFFCSNDYLYSCDYWG | |
| domain | QGTTLTVSSGGGGSGGGGSGGGGSDIVLTQSPPSLAMSLGKRATISCRASESVT | |
| | ILGSHLIYWYQQKPGQPPTLLIQLASNVQTGVPARFSGSGSRTDFTLTIDPVEE | |
| | DDVAVYYCLQSRTIPRTFGGGTKLEIK | |

[0666] The sequences of human CDR sequences of the scFv domains are shown in Table 10 for the heavy chain variable domains and in Table 11 for the light chain variable domains. “ID” stands for the respective SEQ ID NO for each CDR. The CDRs are shown according to the Kabat definition, however, the CDRs under other convention, for example, Chothia or the combined Kabat/Chothia definitions may be readily deduced based on the VH and VL sequences above.

TABLE 10
Heavy Chain Variable Domain CDRs from the sequences above according
to the Kabat numbering scheme (Kabat et al. (1991), “Sequences of
Proteins of Immunological Interest,” 5th Ed. Public Health Service,
National Institutes of Health, Bethesda, MD)

| Candidate | HCDR1 | ID | HCDR2 | ID | HCDR3 | ID |
|---|---|---|---|---|---|---|
| 139109 | NHGMS | 594 | GIVYSGSTYYAASVKG | 634 | HGGESDV | 674 |
| 139103 | NYAMS | 584 | GISRSGENTYYADSVKG | 624 | SPAHYYGGMDV | 664 |
| 139105 | DYAMH | 585 | GISWNSGSIGYADSVKG | 625 | HSFLAY | 665 |
| 139111 | NHGMS | 586 | GIVYSGSTYYAASVKG | 626 | HGGESDV | 666 |
| 139100 | NFGIN | 587 | WINPKNNNTNYAQKFQG | 627 | GPYYYQSYMDV | 667 |
| 139101 | SDAMT | 588 | VISGSGGTYYADSVKG | 628 | LDSSGYYYARGPRY | 668 |
| 139102 | NYGIT | 589 | WISAYNGNTNYAQKFQG | 629 | GPYYYYMDV | 669 |
| 139104 | NHGMS | 590 | GIVYSGSTYYAASVKG | 630 | HGGESDV | 670 |
| 139106 | NHGMS | 591 | GIVYSGSTYYAASVKG | 631 | HGGESDV | 671 |
| 139107 | NHGMS | 592 | GIVYSGSTYYAASVKG | 632 | HGGESDV | 672 |
| 139108 | DYYMS | 593 | YISSSGSTIYYADSVKG | 633 | ESGDGMDV | 673 |
| 139110 | DYYMS | 595 | YISSSGNTTYYADSVKG | 635 | STMVREDY | 675 |
| 139112 | NHGMS | 596 | GIVYSGSTYYAASVKG | 636 | HGGESDV | 676 |
| 139113 | NHGMS | 597 | GIVYSGSTYYAASVKG | 637 | HGGESDV | 677 |
| 139114 | NHGMS | 598 | GIVYSGSTYYAASVKG | 638 | HGGESDV | 678 |
| 149362 | SSYYYWG | 599 | SIYYSGSAYYNPSLKS | 639 | HWQEWPDAFDI | 679 |
| 149363 | TSGMCVS | 600 | RIDWDEDKFYSTSLKT | 640 | SGAGGTSATAFDI | 680 |
| 149364 | SYSMN | 601 | SISSSSSYIYYADSVKG | 641 | TIAAVYAFDI | 681 |
| 149365 | DYYMS | 602 | YISSSGSTIYYADSVKG | 642 | DLRGAFDI | 682 |
| 149366 | SHYIM | 603 | MINPSGGVTAYSQTLQG | 643 | EGSGSGWYFDF | 683 |
| 149367 | SGGYYWS | 604 | YIYYSGSTYYNPSLKS | 644 | AGIAARLRGAFDI | 684 |
| 149368 | SYAIS | 605 | GIIPIFGTANYAQKFQG | 645 | RGGYQLLRWDVGLLRSAFDI | 685 |
| 149369 | SNSAAWN | 606 | RTYYRSKWYSFYAISLKS | 646 | SSPEGLFLYWFDP | 686 |
| BCMA_EBB- | SYAMS | 607 | AISGSGGSTYYADSVKG | 647 | VEGSGSLDY | 687 |
| C1978-A4 | | | | | | |
| BCMA_EBB- | RYPMS | 608 | GISDSGVSTYYADSAKG | 648 | RAGSEASDI | 688 |
| C1978-G1 | | | | | | |
| BCMA_EBB- | SYAMS | 609 | AISGSGGSTYYADSVKG | 649 | ATYKRELRYYYGMDV | 689 |
| C1979-C1 | | | | | | |
| BCMA_EBB- | SYAMS | 610 | AISGSGGSTYYADSVKG | 650 | ATYKRELRYYYGMDV | 690 |
| C1978-C7 | | | | | | |
| BCMA_EBB- | DYAMH | 611 | GISWNSGSIGYADSVKG | 651 | VGKAVPDV | 691 |
| C1978-D10 | | | | | | |
| BCMA_EBB- | DYAMH | 612 | SINWKGNSLAYGDSVKG | 652 | HQGVAYYNYAMDV | 692 |
| C1979-C12 | | | | | | |
| BCMA_EBB- | SYAMS | 613 | AISGSGGSTYYADSVKG | 653 | VVRDGMDV | 693 |
| C1980-G4 | | | | | | |
| BCMA_EBB- | SYAMS | 614 | AISGSGGSTYYADSVKG | 654 | IPQTGTFDY | 694 |
| C1980-D2 | | | | | | |
| BCMA_EBB- | SYAMS | 615 | AISGSGGSTYYADSVKG | 655 | ANYKRELRYYYGMDV | 695 |
| C1978-A10 | | | | | | |
| BCMA_EBB- | SYAMS | 616 | AISGSGGSTYYADSVKG | 656 | ALVGATGAFDI | 696 |
| C1978-D4 | | | | | | |
| BCMA_EBB- | SYAMS | 617 | AISGSGGSTYYADSVKG | 657 | WFGEGFDP | 697 |
| C1980-A2 | | | | | | |
| BCMA_EBB- | SYAMS | 618 | AISGSGGSTYYADSVKG | 658 | VGYDSSGYYRDYYGMDV | 698 |
| C1981-C3 | | | | | | |
| BCMA_EBB- | SYAMS | 619 | AISGSGGSTYYADSVKG | 659 | MGMSSGYLGAFDI | 699 |
| C1978-G4 | | | | | | |
| A7D12.2 | NFGMN | 620 | WINTYTGESYFADDFKG | 660 | GEIYYGYDGGFAY | 700 |
| C11D5.3 | DYSIN | 621 | WINTETREPAYAYDFRG | 661 | DYSYAMDY | 701 |
| C12A3.2 | HYSMN | 622 | RINTESGVPIYADDFKG | 662 | DYLYSLDF | 702 |
| C13F12.1 | HYSMN | 623 | RINTETGEPLYADDFKG | 663 | DYLYSCDY | 703 |

TABLE 11
Light Chain Variable Domain CDRs according to the Kabat numbering scheme
(Kabat et al. (1991), “Sequences of Proteins of Immunological Interest,”
5th Ed. Public Health Service, National Institutes of Health, Bethesda, MD)

| Candidate | LCDR1 | ID | LCDR2 | ID | LCDR3 | ID |
|---|---|---|---|---|---|---|
| 139109 | RASQSISSYLN | 714 | AASSLQS | 754 | QQSYSTPYT | 794 |
| 139103 | RASQSISSSFLA | 704 | GASRRAT | 744 | QQYHSSPSWT | 784 |
| 139105 | RSSQSLLHSNGYNYLD | 705 | LGSNRAS | 745 | MQALQTPYT | 785 |
| 139111 | KSSQSLLRNDGKTPLY | 706 | EVSNRFS | 746 | MQNIQFPS | 786 |
| 139100 | RSSQSLLHSNGYNYLN | 707 | LGSKRAS | 747 | MQALQTPYT | 787 |
| 139101 | RASQSISSYLN | 708 | GASTLAS | 748 | QQSYKRAS | 788 |
| 139102 | RSSQSLLYSNGYNYVD | 709 | LGSNRAS | 749 | MQGRQFPYS | 789 |
| 139104 | RASQSVSSNLA | 710 | GASTRAS | 750 | QQYGSSLT | 790 |
| 139106 | RASQSVSSKLA | 711 | GASIRAT | 751 | QQYGSSSWT | 791 |
| 139107 | RASQSVGSTNLA | 712 | DASNRAT | 752 | QQYGSSPPWT | 792 |
| 139108 | RASQSISSYLN | 713 | AASSLQS | 753 | QQSYTLA | 793 |
| 139110 | KSSESLVHNSGKTYLN | 715 | EVSNRDS | 755 | MQGTHWPGT | 795 |
| 139112 | QASEDINKFLN | 716 | DASTLQT | 756 | QQYESLPLT | 796 |
| 139113 | RASQSVGSNLA | 717 | GASTRAT | 757 | QQYNDWLPVT | 797 |
| 139114 | RASQSIGSSSLA | 718 | GASSRAS | 758 | QQYAGSPPFT | 798 |
| 149362 | KASQDIDDAMN | 719 | SATSPVP | 759 | LQHDNFPLT | 799 |
| 149363 | RASQDIYNNLA | 720 | AANKSQS | 760 | QHYYRFPYS | 800 |
| 149364 | RSSQSLLHSNGYNYLD | 721 | LGSNRAS | 761 | MQALQTPYT | 801 |
| 149365 | GGNNIGTKSVH | 722 | DDSVRPS | 762 | QVWDSDSEHVV | 802 |
| 149366 | SGDGLSKKYVS | 723 | RDKERPS | 763 | QAWDDTTVV | 803 |
| 149367 | RASQGIRNWLA | 724 | AASNLQS | 764 | QKYNSAPFT | 804 |
| 149368 | GGNNIGSKSVH | 725 | GKNNRPS | 765 | SSRDSSGDHLRV | 805 |
| 149369 | QGDSLGNYYAT | 726 | GTNNRPS | 766 | NSRDSSGHHLL | 806 |
| BCMA_EBB-C1978-A4 | RASQSVSSAYLA | 727 | GASTRAT | 767 | QHYGSSFNGSSLFT | 807 |
| BCMA_EBB-C1978-G1 | RASQSVSNSLA | 728 | DASSRAT | 768 | QQFGTSSGLT | 808 |
| BCMA_EBB-C1979-C1 | RASQSVSSSFLA | 729 | GASSRAT | 769 | QQYHSSPSWT | 809 |
| BCMA_EBB-C1978-C7 | RASQSVSTTFLA | 730 | GSSNRAT | 770 | QQYHSSPSWT | 810 |
| BCMA_EBB-C1978-D10 | RASQSISSYLN | 731 | AASSLQS | 771 | QQSYSTPYS | 811 |
| BCMA_EBB-C1979-C12 | RATQSIGSSFLA | 732 | GASQRAT | 772 | QHYESSPSWT | 812 |
| BCMA_EBB-C1980-G4 | RASQSVSSSYLA | 733 | GASSRAT | 773 | QQYGSPPRFT | 813 |
| BCMA_EBB-C1980-D2 | RASQSVSSSYLA | 734 | GASSRAT | 774 | QHYGSSPSWT | 814 |
| BCMA_EBB-C1978-A10 | RASQRVASNYLA | 735 | GASSRAT | 775 | QHYDSSPSWT | 815 |
| BCMA_EBB-C1978-D4 | RASQSLSSNFLA | 736 | GASNWAT | 776 | QYYGTSPMYT | 816 |
| BCMA_EBB-C1980-A2 | RSSQSLLHSNGYNYLD | 737 | LGSNRAS | 777 | MQALQTPLT | 817 |
| BCMA_EBB-C1981-C3 | RASQSVSSSYLA | 738 | GTSSRAT | 778 | QHYGNSPPKFT | 818 |
| BCMA_EBB-C1978-G4 | RASQSVASSFLA | 739 | GASGRAT | 779 | QHYGGSPRLT | 819 |
| A7D12.2 | RASQDVNTAVS | 740 | SASYRYT | 780 | QQHYSTPWT | 820 |
| C11D5.3 | RASESVSVIGAHLIH | 741 | LASNLET | 781 | LQSRIFPRT | 821 |
| C12A3.2 | RASESVTILGSHLIY | 742 | LASNVQT | 782 | LQSRTIPRT | 822 |
| C13F12.1 | RASESVTILGSHLIY | 743 | LASNVQT | 783 | LQSRTIPRT | 823 |

[0667] In one embodiment, the BCMA binding domain comprises one or more (e.g., all three) light chain complementary determining region 1 (LC CDR1), light chain complementary determining region 2 (LC CDR2), and light chain complementary determining region 3 (LC CDR3) of a BCMA binding domain described herein, e.g., provided in Table 8, 9 or 11, and/or one or more (e.g., all three) heavy chain complementary determining region 1 (HC CDR1), heavy chain complementary determining region 2 (HC CDR2), and heavy chain complementary determining region 3 (HC CDR3) of a BCMA binding domain described herein, e.g., provided in Table 8, 9 or 10. In one embodiment, the BCMA binding domain comprises one, two, or all of LC CDR1, LC CDR2, and LC CDR3 of any amino acid sequences as provided in Table 8; and one, two or all of HC CDR1, HC CDR2, and HC CDR3 of any amino acid sequences as provided in Table 8.

[0668] In one embodiment, the BCMA antigen binding domain comprises:
[0669] (a) a LC CDR1 amino acid sequence of SEQ ID NO: 714, a LC CDR2 amino acid sequence of SEQ ID NO: 754, and a LC CDR3 amino acid sequence of SEQ ID NO: 794; and
[0670] (b) a HC CDR1 amino acid sequence of SEQ ID NO: 594, a HC CDR2 amino acid sequence of SEQ ID NO: 634, and a HC CDR3 amino acid sequence of SEQ ID NO: 674
[0671] (a) a LC CDR1 amino acid sequence of SEQ ID NO: 704, a LC CDR2 amino acid sequence of SEQ ID NO: 744, and a LC CDR3 amino acid sequence of SEQ ID NO: 784; and
[0672] (b) a HC CDR1 amino acid sequence of SEQ ID NO: 584, a HC CDR2 amino acid sequence of SEQ ID NO: 624, and a HC CDR3 amino acid sequence of SEQ ID NO: 664
[0673] (a) a LC CDR1 amino acid sequence of SEQ ID NO: 705, a LC CDR2 amino acid sequence of SEQ ID NO: 745, and a LC CDR3 amino acid sequence of SEQ ID NO: 785; and
[0674] (b) a HC CDR1 amino acid sequence of SEQ ID NO: 585, a HC CDR2 amino acid sequence of SEQ ID NO: 625, and a HC CDR3 amino acid sequence of SEQ ID NO: 665
[0675] (a) a LC CDR1 amino acid sequence of SEQ ID NO: 706, a LC CDR2 amino acid sequence of SEQ ID NO: 746, and a LC CDR3 amino acid sequence of SEQ ID NO: 786; and
[0676] (b) a HC CDR1 amino acid sequence of SEQ ID NO: 586, a HC CDR2 amino acid sequence of SEQ ID NO: 626, and a HC CDR3 amino acid sequence of SEQ ID NO: 666
[0677] (a) a LC CDR1 amino acid sequence of SEQ ID NO: 707, a LC CDR2 amino acid sequence of SEQ ID NO: 747, and a LC CDR3 amino acid sequence of SEQ ID NO: 787; and
[0678] (b) a HC CDR1 amino acid sequence of SEQ ID NO: 587, a HC CDR2 amino acid sequence of SEQ ID NO: 627, and a HC CDR3 amino acid sequence of SEQ ID NO: 667
[0679] (a) a LC CDR1 amino acid sequence of SEQ ID NO: 708, a LC CDR2 amino acid sequence of SEQ ID NO: 748, and a LC CDR3 amino acid sequence of SEQ ID NO: 788; and
[0680] (b) a HC CDR1 amino acid sequence of SEQ ID NO: 588, a HC CDR2 amino acid sequence of SEQ ID NO: 628, and a HC CDR3 amino acid sequence of SEQ ID NO: 668
[0681] (a) a LC CDR1 amino acid sequence of SEQ ID NO: 709, a LC CDR2 amino acid sequence of SEQ ID NO: 749, and a LC CDR3 amino acid sequence of SEQ ID NO: 789; and
[0682] (b) a HC CDR1 amino acid sequence of SEQ ID NO: 589, a HC CDR2 amino acid sequence of SEQ ID NO: 629, and a HC CDR3 amino acid sequence of SEQ ID NO: 669
[0683] (a) a LC CDR1 amino acid sequence of SEQ ID NO: 710, a LC CDR2 amino acid sequence of SEQ ID NO: 750, and a LC CDR3 amino acid sequence of SEQ ID NO: 790; and
[0684] (b) a HC CDR1 amino acid sequence of SEQ ID NO: 590, a HC CDR2 amino acid sequence of SEQ ID NO: 630, and a HC CDR3 amino acid sequence of SEQ ID NO: 670
[0685] (a) a LC CDR1 amino acid sequence of SEQ ID NO: 711, a LC CDR2 amino acid sequence of SEQ ID NO: 751, and a LC CDR3 amino acid sequence of SEQ ID NO: 791; and
[0686] (b) a HC CDR1 amino acid sequence of SEQ ID NO: 591, a HC CDR2 amino acid sequence of SEQ ID NO: 631, and a HC CDR3 amino acid sequence of SEQ ID NO: 671
[0687] (a) a LC CDR1 amino acid sequence of SEQ ID NO: 712, a LC CDR2 amino acid sequence of SEQ ID NO: 752, and a LC CDR3 amino acid sequence of SEQ ID NO: 792; and
[0688] (b) a HC CDR1 amino acid sequence of SEQ ID NO: 592, a HC CDR2 amino acid sequence of SEQ ID NO: 632, and a HC CDR3 amino acid sequence of SEQ ID NO: 672
[0689] (a) a LC CDR1 amino acid sequence of SEQ ID NO: 713, a LC CDR2 amino acid sequence of SEQ ID NO: 753, and a LC CDR3 amino acid sequence of SEQ ID NO: 793; and
[0690] (b) a HC CDR1 amino acid sequence of SEQ ID NO: 593, a HC CDR2 amino acid sequence of SEQ ID NO: 633, and a HC CDR3 amino acid sequence of SEQ ID NO: 673
[0691] (a) a LC CDR1 amino acid sequence of SEQ ID NO: 715, a LC CDR2 amino acid sequence of SEQ ID NO: 755, and a LC CDR3 amino acid sequence of SEQ ID NO: 795; and
[0692] (b) a HC CDR1 amino acid sequence of SEQ ID NO: 595, a HC CDR2 amino acid sequence of SEQ ID NO: 635, and a HC CDR3 amino acid sequence of SEQ ID NO: 675
[0693] (a) a LC CDR1 amino acid sequence of SEQ ID NO: 716, a LC CDR2 amino acid sequence of SEQ ID NO: 756, and a LC CDR3 amino acid sequence of SEQ ID NO: 796; and
[0694] (b) a HC CDR1 amino acid sequence of SEQ ID NO: 596, a HC CDR2 amino acid sequence of SEQ ID NO: 636, and a HC CDR3 amino acid sequence of SEQ ID NO: 676
[0695] (a) a LC CDR1 amino acid sequence of SEQ ID NO: 717, a LC CDR2 amino acid sequence of SEQ ID NO: 757, and a LC CDR3 amino acid sequence of SEQ ID NO: 797; and
[0696] (b) a HC CDR1 amino acid sequence of SEQ ID NO: 597, a HC CDR2 amino acid sequence of SEQ ID NO: 637, and a HC CDR3 amino acid sequence of SEQ ID NO: 677
[0697] (a) a LC CDR1 amino acid sequence of SEQ ID NO: 718, a LC CDR2 amino acid sequence of SEQ ID NO: 758, and a LC CDR3 amino acid sequence of SEQ ID NO: 798; and
[0698] (b) a HC CDR1 amino acid sequence of SEQ ID NO: 598, a HC CDR2 amino acid sequence of SEQ ID NO: 638, and a HC CDR3 amino acid sequence of SEQ ID NO: 678
[0699] (a) a LC CDR1 amino acid sequence of SEQ ID NO: 719, a LC CDR2 amino acid sequence of SEQ ID NO: 759, and a LC CDR3 amino acid sequence of SEQ ID NO: 799; and
[0700] (b) a HC CDR1 amino acid sequence of SEQ ID NO: 599, a HC CDR2 amino acid sequence of SEQ ID NO: 639, and a HC CDR3 amino acid sequence of SEQ ID NO: 679
[0701] (a) a LC CDR1 amino acid sequence of SEQ ID NO: 720, a LC CDR2 amino acid sequence of SEQ ID NO: 760, and a LC CDR3 amino acid sequence of SEQ ID NO: 800; and
[0702] (b) a HC CDR1 amino acid sequence of SEQ ID NO: 600, a HC CDR2 amino acid sequence of SEQ ID NO: 640, and a HC CDR3 amino acid sequence of SEQ ID NO: 680
[0703] (a) a LC CDR1 amino acid sequence of SEQ ID NO: 721, a LC CDR2 amino acid sequence of SEQ ID NO: 761, and a LC CDR3 amino acid sequence of SEQ ID NO: 801; and
[0704] (b) a HC CDR1 amino acid sequence of SEQ ID NO: 601, a HC CDR2 amino acid sequence of SEQ ID NO: 641, and a HC CDR3 amino acid sequence of SEQ ID NO: 681
[0705] (a) a LC CDR1 amino acid sequence of SEQ ID NO: 722, a LC CDR2 amino acid sequence of SEQ ID NO: 762, and a LC CDR3 amino acid sequence of SEQ ID NO: 802; and
[0706] (b) a HC CDR1 amino acid sequence of SEQ ID NO: 602, a HC CDR2 amino acid sequence of SEQ ID NO: 642, and a HC CDR3 amino acid sequence of SEQ ID NO: 682
[0707] (a) a LC CDR1 amino acid sequence of SEQ ID NO: 723, a LC CDR2 amino acid sequence of SEQ ID NO: 763, and a LC CDR3 amino acid sequence of SEQ ID NO: 803; and
[0708] (b) a HC CDR1 amino acid sequence of SEQ ID NO: 603, a HC CDR2 amino acid sequence of SEQ ID NO: 643, and a HC CDR3 amino acid sequence of SEQ ID NO: 683
[0709] (a) a LC CDR1 amino acid sequence of SEQ ID NO: 724, a LC CDR2 amino acid sequence of SEQ ID NO: 764, and a LC CDR3 amino acid sequence of SEQ ID NO: 804; and
[0710] (b) a HC CDR1 amino acid sequence of SEQ ID NO: 604, a HC CDR2 amino acid sequence of SEQ ID NO: 644, and a HC CDR3 amino acid sequence of SEQ ID NO: 684
[0711] (a) a LC CDR1 amino acid sequence of SEQ ID NO: 725, a LC CDR2 amino acid sequence of SEQ ID NO: 765, and a LC CDR3 amino acid sequence of SEQ ID NO: 805; and
[0712] (b) a HC CDR1 amino acid sequence of SEQ ID NO: 605, a HC CDR2 amino acid sequence of SEQ ID NO: 645, and a HC CDR3 amino acid sequence of SEQ ID NO: 685 or
[0713] (a) a LC CDR1 amino acid sequence of SEQ ID NO: 726, a LC CDR2 amino acid sequence of SEQ ID NO: 766, and a LC CDR3 amino acid sequence of SEQ ID NO: 806; and
[0714] (b) a HC CDR1 amino acid sequence of SEQ ID NO: 606, a HC CDR2 amino acid sequence of SEQ ID NO: 646, and a HC CDR3 amino acid sequence of SEQ ID NO: 686.

[0715] In one embodiment, the BCMA binding domain comprises a light chain variable region described herein (e.g., in Table 8 or 9) and/or a heavy chain variable region described herein (e.g., in Table 8 or 9). In one embodiment, the BCMA binding domain is a scFv comprising a light chain and a heavy chain of an amino acid sequence listed in Table 8 or 9. In an embodiment, the BCMA binding domain (e.g., an scFv) comprises: a light chain variable region comprising an amino acid sequence having at least one, two or three modifications (e.g., substitutions, e.g., conservative substitutions) but not more than 30, 20 or 10 modifications (e.g., substitutions, e.g., conservative substitutions) of an amino acid sequence of a light chain variable region provided in Table 8 or 9, or a sequence with 95-99% identity with an amino acid sequence provided in Table 8 or 9; and/or a heavy chain variable region comprising an amino acid sequence having at least one, two or three modifications (e.g., substitutions, e.g., conservative substitutions) but not more than 30, 20 or 10 modifications (e.g., substitutions, e.g., conservative substitutions) of an amino acid sequence of a heavy chain variable region provided in Table 8 or 9, or a sequence with 95-99% identity to an amino acid sequence provided in Table 8 or 9.

[0716] In one embodiment, the BCMA binding domain comprises an amino acid sequence selected from a group consisting of SEQ ID NO: 249; SEQ ID NO: 239, SEQ ID NO: 240; SEQ ID NO: 241; SEQ ID NO: 242; SEQ ID NO: 243; SEQ ID NO: 244, SEQ ID NO: 245, SEQ ID NO: 246, SEQ ID NO: 247, SEQ ID NO: 248, SEQ ID NO: 250, SEQ ID NO: 251, SEQ ID NO: 252, SEQ ID NO: 253, SEQ ID NO: 329, SEQ ID NO: 330, SEQ ID NO: 331, SEQ ID NO: 332, SEQ ID NO: 333, SEQ ID NO: 334, SEQ ID NO: 335, SEQ ID NO: 336, SEQ ID NO: 337, SEQ ID NO: 338, SEQ ID NO: 339, SEQ ID NO: 340, SEQ ID NO: 341, SEQ ID NO: 342, SEQ ID NO: 343, SEQ ID NO: 344, SEQ ID NO: 345, SEQ ID NO: 346, SEQ ID NO: 347, SEQ ID NO: 348, SEQ ID NO: 349, SEQ ID NO: 463. SEQ ID NO: 464, SEQ ID NO: 465 and SEQ ID NO: 466; or an amino acid sequence having at least one, two or three modifications (e.g., substitutions, e.g., conservative substitutions) but not more than 30, 20 or 10 modifications (e.g., substitutions, e.g., conservative substitutions) to any of the aforesaid sequences; or a sequence with 95-99% identity to any of the aforesaid sequences. In one embodiment, the BCMA binding domain is a scFv, and a light chain variable region comprising an amino acid sequence described herein, e.g., in Table 8 or 9, is attached to a heavy chain variable region comprising an amino acid sequence described herein, e.g., in Table 8 or 9, via a linker, e.g., a linker described herein. In one embodiment, the BCMA binding domain includes a (Gly4-Ser)n linker, wherein n is 1, 2, 3, 4, 5, or 6, preferably 3 (SEQ ID NO: 1872). The light chain variable region and heavy chain variable region of a scFv can be, e.g., in any of the following orientations: light chain variable region-linker-heavy chain variable region or heavy chain variable region-linker-light chain variable region.

[0717] Any known BCMA CAR, e.g., the BMCA antigen binding domain of any known BCMA CAR, in the art can be used in accordance with the instant disclosure. For example, those described herein.

### Exemplary CAR Molecules

[0718] In one aspect, a CAR, e.g., a CAR expressed by a cell disclosed herein, comprises a CAR molecule comprising an antigen binding domain that binds to a B cell antigen, e.g., as described herein, such as CD19 or BCMA.

[0719] In one embodiment, the CAR comprises a CAR molecule comprising a CD19 antigen binding domain (e.g., a murine, human or humanized antibody or antibody fragment that specifically binds to CD19), a transmembrane domain, and an intracellular signaling domain (e.g., an intracellular signaling domain comprising a costimulatory domain and/or a primary signaling domain).

[0720] Exemplar CAR molecules described herein are provided in Table 12. The CAR molecules in Table 12 comprise a CD19 antigen binding domain, e.g., an amino acid sequence of any CD19 antigen binding domain provided in Table 4. Any of the exemplary CAR molecules listed below, or combinations thereof, can be used with the cells and methods disclosed herein.

TABLE 12
Exemplary CD19 CAR molecules

| | | | SEQ |
|---|---|---|---|
| | | | ID |
| Antigen | Name | Amino Acid Sequence | NO: |
| CD19 | CTL019 | MALPVTALLLPLALLLHAARPDIQMTQTTSSLSASLGDRVTISCRASQ | 185 |
| | | DISKYLNWYQQKPDGTVKLLIYHTSRLHSGVPSRESGSGSGTDYSLTI | |
| | | SNLEQEDIATYFCQQGNTLPYTFGGGTKLEITGGGGSGGGGSGGGGSE | |
| | | VKLQESGPGLVAPSQSLSVTCTVSGVSLPDYGVSWIRQPPRKGLEWLG | |
| | | VIWGSETTYYNSALKSRLTIIKDNSKSQVFLKMNSLQTDDTAIYYCAK | |
| | | HYYYGGSYAMDYWGQGTSVTVSSTTTPAPRPPTPAPTIASQPLSLRPE | |
| | | ACRPAAGGAVHTRGLDFACDIYIWAPLAGTCGVLLLSLVITLYCKRGR | |
| | | KKLLYIFKQPFMRPVQTTQEEDGCSCRFPEEEEGGCELRVKFSRSADA | |
| | | PAYKQGQNQLYNELNLGRREEYDVLDKPRGRDPEMCGKPRRKNPQEGL | |
| | | YNELQKDKMAEAYSEIGMKGERRRGKGHDGLYQGLSTATKDTYDALHM | |
| | | QALPPR | |
| CD19 | CAR 1 | MALPVTALLLPLALLLHAARPEIVMTQSPATLSLSPGERATLSCRASQ | 186 |
| | | DISKYLNWYQQKPGQAPRLLIYHTSRLHSGIPARFSGSGSGTDYTLTI | |
| | | SSLQPEDFAVYFCQQGNTLPYTFGQGTKLEIKGGGGSGGGGSGGGGSQ | |
| | | VQLQESGPGLVKPSETLSLTCTVSGVSLPDYGVSWIRQPPGKGLEWIG | |
| | | VIWGSETTYYSSSLKSRVTISKDNSKNQVSLKLSSVTAADTAVYYCAK | |
| | | HYYYGGSYAMDYWGQGTLVTVSSTTTPAPRPPTPAPTIASQPLSLRPE | |
| | | ACRPAAGGAVHTRGLDFACDIYIWAPLAGTCGVLLLSLVITLYCKRGR | |
| | | KKLLYIFKQPFMRPVQTTQEEDGCSCRFPEEEEGGCELRVKFSRSADA | |
| | | PAYKQGQNQLYNELNLGRREEYDVLDKPRGRDPEMCGKPRRKNPQEGL | |
| | | YNELQKDKMAEAYSEIGMKGERRRGKGHDGLYQGLSTATKDTYDALHM | |
| | | QALPPR | |
| CD19 | CAR 2 | MALPVTALLLPLALLLHAARPEIVMTQSPATLSLSPGERATLSCRASQ | 187 |
| | | DISKYLNWYQQKPGQAPRLLIYHTSRLHSGIPARFSGSGSGTDYTLTI | |
| | | SSLQPEDFAVYFCQQGNTLPYTFGQGTKLEIKGGGGSGGGGSGGGGSQ | |
| | | VQLQESGPGLVKPSETLSLTCTVSGVSLPDYGVSWIRQPPGKGLEWIG | |
| | | VIWGSETTYYQSSLKSRVTISKDNSKNQVSLKLSSVTAADTAVYYCAK | |
| | | HYYYGGSYAMDYWGQGTLVTVSSTTTPAPRPPTPAPTIASQPLSLRPE | |
| | | ACRPAAGGAVHTRGLDFACDIYIWAPLAGTCGVLLLSLVITLYCKRGR | |
| | | KKLLIFKQPFMRPVQTTQEEDGCSCREPPEEEEGGCELRVKFSRSADA | |
| | | PAYKQGQNQLYNELNLGRREEYDVLDKPRGRDPEMGGKPRRKNPQEGL | |
| | | YNELQKDKMAEAYSEIGMKGERRRGKGHDGLYQGLSTATKDTYDALHM | |
| | | QALPPR | |
| CD19 | CAR 3 | MALPVTALLLPLALLLHAARPQVQLQESGPGLVKPSETLSLTCTVSGV | 188 |
| | | SLPDYGVSWIRQPPGKGLEWIGVIWGSETTYYSSSLKSRVTISKDNSK | |
| | | NQVSLKLSSVTAADTAVYYCAKHYYYGGSYAMDYWGQGTLVTVSSGGG | |
| | | GSGGGGSGGGGSEIVMTQSPATLSLSPGERATLSCRASQDISKYLNWY | |
| | | QQKPGQAPRLLIYHTSRLHSGIPARFSGSGSGTDYTLTISSLQPEDFA | |
| | | VYFCQQGNTLPYTFGQGTKLEIKTTTPAPRPPTPAPTIASQPLSLRPE | |
| | | ACRPAAGGAVHTRGLDFACDIYIWAPLAGTCGVLLLSLVITLYCKRGR | |
| | | KKLLYIFKQPFMRPVQTTQEEDGCSCRFPEEEEGGCELRVKFSRSADA | |
| | | PAYKQGQNQLYNELNLGRREEYDVLDKPRGRDPEMGGKPRRKNPQEGL | |
| | | YNELQKDKMAEAYSEIGMKGERRRGKGHDGLYQGLSTATKDTYDALHM | |
| | | QALPPR | |
| CD19 | CAR 4 | MALPVTALLLPLALLLHAARPQVQLQESGPGLVKPSETLSLTCTVSGV | 189 |
| | | SLPDYGVSWIRQPPGKGLEWIGVIWGSETTYYQSSLKSRVTISKDNSK | |
| | | NQVSLKLSSVTAADTAVYYCAKHYYYGGSYAMDYWGQGTLVTVSSGGG | |
| | | GSGGGGSGGGGSEIVMTQSPATLSLSPGERATLSCRASQDISKYLNWY | |
| | | QQKPGQAPRLLIYHTSRLHSGIPARFSGSGSGTDYTLTISSLQPEDFA | |
| | | VYFCQQGNTLPYTFGQGTKLEIKTTTPAPRPPTPAPTIASQPLSLRPE | |
| | | ACRPAAGGAVHTRGLDFACDIYIWAPLAGTCGVLLLSLVITLYCKRGR | |
| | | KKLLYIFKQPFMRPVQTTQEEDGCSCRFPEEEEGGCELRVKFSRSADA | |
| | | PAYKQGQNQLYNELNLGRREEYDVLDKPRGRDPEMGGKPRRKNPQEGL | |
| | | YNELQKDKMAEAYSEIGMKGERRRGKGHDGLYQGLSTATKDTYDALHM | |
| | | QALPPR | |
| CD19 | CAR 5 | MALPVTALLLPLALLLHAARPEIVMTQSPATLSLSPGERATLSCRASQ | 190 |
| | | DISKYLNWYQQKPGQAPPLLIYHTSRLHSGIPARFSGSGSGTDYTLTI | |
| | | SSLQPEDFAVYFCQQGNTLPYTFGQGTKLEIKGGGGSGGGGSGGGGSG | |
| | | GGGSQVQLQESGPGLVKPSETLSLTCTVSGVSLPDYGVSWIRQPPGKG | |
| | | LEWIGVIWGSETTYYSSSLKSRVTISKDNSKNQVSLKLSSVTAADTAV | |
| | | YYCAKHYYYGGSYAMDYWGQGTLVTVSSTTTPAPRPPTPAPTIASQPL | |
| | | SLRPEACRPAAGGAVHTRGLDFACDIYIWAPLAGTCGVLLLSLVITLY | |
| | | CKRGRKKLLYIFKQPFMRPVQTTQEEDGCSCRFPEEEEGGCELRVKFS | |
| | | RSADAPAYKQGQNQLYNELNLGRREEYDVLDKRRGRDPEMGGKPRRKN | |
| | | PQEGLYNELQKDKMAEAYSEIGMKGERRRGKGHDGLYQGLSTATKDTY | |
| | | DALHMQALPPR | |
| CD19 | CAR 6 | MALPVTALLLPLALLLHAARPEIVMTOSPATLSLSPGERATLSCRASQ | 191 |
| | | DISKYLNWYQQKPGQAPRLLIYHTSRLHSGIPARESGSGSGTDYTLTI | |
| | | SSLQPEDFAVYFCQQGNTLPYTFGQGTKLEIKGGGGSGGGGSGGGGSG | |
| | | GGGSQVQLQESGPGLVKPSETLSLTCTVSGVSLPDYGVSWIRQPPGNG | |
| | | LEWIGVIWGSETTYYQSSLKSRVTISKDNSKNQVSLKLSSVTAADTAV | |
| | | YYCAKHYYYGGSYAMDYWGQGTLVTVSSTTTPAPRPPTPAPTIASQPL | |
| | | SLRPEACRPAAGGAVHTRGLDFACDIYIWAPLAGTCGVLLLSLVITLY | |
| | | CHRGRKKLLYIFKQPFMRPVQTTQEEDGCSCRFPEEEEGGCELRVKFS | |
| | | RSADAPAYKQGQNQLYNELNLGRREEYDVLDKRRGRDPEMGGKPRRKN | |
| | | PQEGLYNELQKDKMAEAYSEIGMKGERRRGKGHDGLYQGLSTATKDTY | |
| | | DALHMQALPPR | |
| CD19 | CAR 7 | MALPVTALLLPLALLLHAARPQVQLQESGPGLVKPSETLSLTCTVSGV | 192 |
| | | SLPDYGVSWIRQPPGKGLEWIGVIWGSETTYYSSSLKSRVTISKDNSK | |
| | | NQVSLKLSSVTAADTAVYYCAKHYYYGGSYAMDYWGQGTLVTVSSGGG | |
| | | GSGGGGSGGGGSGGGGSEIVMTQSPATLSLSPGERATLSCRASQDISK | |
| | | YLNWYQQKPGQAPRLLIYHTSRLHSGIPARFSGSGSGTDYTLTISSLQ | |
| | | PEDFAVYFCQQGNTLPYTEGQGTKLEIKTTTPAPRPPTPAPTIASQPL | |
| | | SLRPEACRPAAGGAVHTRGLDFACDIYIWAPLAGTCGVLLLSLVITLY | |
| | | CHRGRKKLLYIFKQPFMRPVQTTQEEDGCSCRFPEEEEGGCELRVKFS | |
| | | RSADAPAYKQGQNQLYNELNLGRREEYDVLDKRRGRDPEMGGKPRRKN | |
| | | PQEGLYNELQKDKMAEAYSEIGMKGERRRGKGHDGLYQGLSTATKDTY | |
| | | DALHMQALPPR | |
| CD19 | CAR 8 | MALPVTALLLPLALLLHAARPQVQLQESGPGLVKPSETLSLTCTVSGV | 193 |
| | | SLPDYGVSWIRQPPGKGLEWIGVIWGSETTYYQSSLKSRVTISKDNSK | |
| | | NQVSLKLSSVTAADTAVYYCAKHYYYGGSYAMDYWGQGTLVTVSSGGG | |
| | | GSGGGGSGGGGSGGGGSEIVMTQSPATLSLSPGERATLSCRASQDISK | |
| | | YLNWYQQKPGQAPRLLIYHTSRLHSGIPARFSGSGSGTDYTLTISSLQ | |
| | | PEDFAVYFCQQGNTLPYTFGQGTKLEIKTTTPAPRPPTPAPTIASQPL | |
| | | SLRPEACRPAAGGAVHTRGLDFACDIYIWAPLAGTCGVLLLSLVITLY | |
| | | CHRGRKKLLYIFKQPFMRPVQTTQEEDGCSCREPEEEEGGCELRVKFS | |
| | | RSADAPAYKQGQNQLYNELNLGRREEYDVLDKRRGRDPEMGGKPRRKN | |
| | | PQEGLYNELQKDKMAEAYSEIGMKGERRRGKGHDGLYQGLSTATKDTY | |
| | | DALHMQALPPR | |
| CD19 | CAR 9 | MALPVTALLLPLALLLHAARPEIVMTQSPATLSLSPGERATLSCRASQ | 194 |
| | | DISKYLNWYQQKPGQAPRLLIYHTSRLHSGIPARFSGSGSGTDYTLTI | |
| | | SSLQPEDFAVYFCQQGNTLPYTFGQGTKLEIKGGGGSGGGGSGGGGSG | |
| | | GGGSQVQLOESGPGLNKPSETLSLTCTVSGVSLPDYGVSWIRQPPGKG | |
| | | LEWIGVIWGSETTYYNSSLKSRVTISKDNSKNQVSLKLSSVTAADTAV | |
| | | YYCAKHYYYGGSYAMDYWGQGTLVTVSSTTTPAPRPPTPAPTIASQPL | |
| | | SLRPEACRPAAGGAVHTRGLDFACDIYIWAPLAGTCGVLLLSLVITLY | |
| | | CKRGRKKLLYIFKQPFMRPVQTTQEEDGCSCRFPEEEEGGCELRVKFS | |
| | | RSADAPAYKQGQNQLYNELNLGRREEYDVLDKRRGRDPEMGGKPRRKN | |
| | | PQEGLYNELQKDKMAEAYSEIGMKGERRRGKGHDGLYQGLSTATKDTY | |
| | | DALHMQALPPR | |
| CD19 | CAR 10 | MALPVTALLLPLALLLHAARPEIVMTQSPATLSLSPGERATLSCPASQ | 195 |
| | | DISKYLNWYQQKPGQAPRLLIYHTSRLHSGIPARFSGSGSGTDYTLTI | |
| | | SSLQPEDFAVYFCQQGNTLPYTFGQGTKLEIKGGGGSGGGGSGGGGSG | |
| | | GGGSQVQLQESGPGLVKPSETLSLTCTVSGVSLPDYGVSWIRQPPGKG | |
| | | LEWIGVIWGSETTYYNSSLKSRVTISKDNSKNQVSLKLSSVTAADTAV | |
| | | YYCAKHYYYGGSYAMDYWGQGTLVTVSSTTTPAPRPPTPAPTIASQPL | |
| | | SLRPEACRPAAGGPNHTRGLDFACDIYIWAPLAGTCGVLLLSLVITLY | |
| | | CKRGRKKLLYIFKQPFMRPVQTTQEEDGCSCRFPEDEEGGCELRVKFS | |
| | | RSADAPAYKQGQNQLYNELNLGRREEYDVLDKRRGRDPEMGGKPRRKN | |
| | | PQEGLYNELQKDKMAEAYSEIGMKGERRRGKGHDGLYQGLSTATKDTY | |
| | | DALHMQALPPR | |
| CD19 | CAR 11 | MALPVTALLLPLALLLHAARPQVQLQESGPGLVKPSETLSLTCTVSGV | 196 |
| | | SLPDYGVSWIRQPPGKGLEWIGVIWGSETTYYNSSLKSRVTISKDNSK | |
| | | NQVSLKLSSVTAADTAVYYCAKHYYYGGSYAMDYWGQGTLVTVSSGGG | |
| | | GSGGGGSGGGGSGGGGSEIVMTQSPATLSLSPGERATLSCRASQDISK | |
| | | YLKWYQQKPGQAPRLLIYHTSRLHSGIPARFSGSGSGTDYTLTISSLQ | |
| | | PEDFAVYFCQQGNTLPYTFGQGTKLETNTTTRAPRPPTPAPTIASQPL | |
| | | SLRPEACRPAAGGAVHTRGLDFACDIYIWAPLAGTCGVLLLSLVITLY | |
| | | CKRGRKKLLYIFKQPFMRPVQTTQEEDGCSCRFPEEEEGGCELRVKFS | |
| | | RSADAPAYKQGQNQLYNELNLGRREEYDVLDKRRGRDPEMGGKPRRKN | |
| | | PQEGLYNELQKDKMAEAYSEIGMKGERRRGKGHDGLYQGLSTATKDTY | |
| | | DALHMQALPPR | |
| CD19 | CAR 12 | MALPVTALLLPLALLLHAARPEIVMTQSPATLSLSPGERATLSCRASQ | 197 |
| | | DISKYLNWYQQKPGQAPRLLIYHTSRLHSGIPARFSGSGSGTDYTLTI | |
| | | SSLQPEDFAVYFCQQGNTLPYTFGQGTKLEIKGGGGSGGGGSGGGGSQ | |
| | | VQLQESGPGLVKPSETLSLTCTVSGVSLPDYGVSWIRQPPGKGLEWIG | |
| | | VIWGSETTYYNSSLKSRVTISKDNSKNQVSLKLSSVTAADTAVYYCAK | |
| | | HYYYGGSYAMDYWGQGTLVTVSSTTTPAPRPPTPAPTIASQPLSLRPE | |
| | | ACRPAAGGAVHTRGLDFACDIYIWAPLAGTCGVLLLSLVITLYCKRGR | |
| | | KKLLYIFKQPFMRPVQTTQEEDGCSCRFPEEEEGGCELRVKFSRSADA | |
| | | PAYKQGQNQLYNELNLGRREEYDVLDKRRGRDPEMGGKPRRKNPQEGL | |
| | | YNELQKDKMAEAYSEIGMKGERRRGKGHDGLYQGLSTATKDTYDALHM | |
| | | QALPPR | |

[0721] In one embodiment, the CAR molecule comprises (or consists of) an amino acid sequence as provided in Table 12, or in Table 3 of International Publication No. WO2014/153270, filed Mar. 15, 2014; incorporated herein by reference. In one embodiment, the CAR molecule comprises (or consists of) an amino acid sequence of SEQ ID NO: 185, SEQ ID NO: 186, SEQ ID NO: 187, SEQ ID NO: 188, SEQ ID NO: 189, SEQ ID NO: 190, SEQ ID NO: 191, SEQ ID NO: 192, SEQ ID NO: 193, SEQ ID NO: 194, SEQ ID NO: 195, SEQ ID NO: 196, or SEQ ID NO: 197; or an amino acid sequence having at least one, two, three, four, five, 10, 15, 20 or 30 modifications (e.g., substitutions, e.g., conservative substitutions) but not more than 60, 50, or 40 modifications (e.g., substitutions, e.g., conservative substitutions) of an amino acid sequence of SEQ ID NO: 185, SEQ ID NO: 186, SEQ ID NO: 187, SEQ ID NO: 188, SEQ ID NO: 189, SEQ ID NO: 190, SEQ ID NO: 191, SEQ ID NO: 192, SEQ ID NO: 193, SEQ ID NO: 194, SEQ ID NO: 195, SEQ ID NO: 1%, or SEQ ID NO: 197; or an amino acid sequence having 85%, 90%, 95%, 96%, 97%, 98%, 99% identity to an amino acid sequence of SEQ ID NO: 185, SEQ ID NO: 186, SEQ ID NO: 187, SEQ ID NO: 188, SEQ ID NO: 189, SEQ ID NO: 190, SEQ ID NO: 191, SEQ ID NO: 192, SEQ ID NO: 193, SEQ ID NO: 194, SEQ ID NO: 195, SEQ ID NO: 196, or SEQ ID NO: 197.

[0722] In one aspect, a CAR, e.g., a CAR expressed by a cell disclosed herein, comprises a CAR molecule comprising an antigen binding domain that binds to BCMA, e.g., comprises a BCMA antigen binding domain (e.g., a murine, human or humanized antibody or antibody fragment that specifically binds to BCMA, e.g., human BCMA), a transmembrane domain, and an intracellular signaling domain (e.g., an intracellular signaling domain comprising a costimulatory domain and/or a primary signaling domain).

[0723] Exemplary CAR molecules are provided in Table 13, or Table 1 of WO2016/014565, or as otherwise described herein. The CAR molecules in Table 13 comprise a BCMA antigen binding domain, e.g., an amino acid sequence of any BCMA antigen binding domain provided in Table 8 or 9. Any of the exemplary CAR molecules listed below, or combinations thereof, can be used with the cells and methods disclosed herein

TABLE 13
Exemplary BCMA CAR molecules.
Sequences are provided with a leader sequence.

| | | |
|---|---|---|
| Name/ | SEQ | |
| Description | ID NO: | Sequence |

139109

| | | |
|---|---|---|
| 139109-aa | 859 | MALPVTALLLPLALLLHAARPEVQLVESGGGLVQPGGSLRLSCAVS |
| Full CAR | | GFALSNHGMSWVRRAPGKGLEWVSGIVYSGSTYYAASVKGRFTISR |
| | | DNSRNTLYLQMNSLRPEDTAIYYCSAHGGESDVWGQGTTVTVSSAS |
| | | GGGGSGGRASGGGGSDIQLTQSPSSLSASVGDRVTITCRASQSISSYL |
| | | NWYQQKPGKAPKLLIYAASSLQSGVPSRFSGSGSGTDFTLTISSLQPE |
| | | DFATYYCQQSYSTPYTFGQGTKVEIKTTTPAPRPPTPAPTIASQPLSLR |
| | | PEACRPAAGGAVHTRGLDFACDIYIWAPLAGTCGVLLLSLVITLYCK |
| | | RGRKKLLYIFKQPFMRPVQTTQEEDGCSCRFPEEEEGGCELRVKFSR |
| | | SADAPAYKQGQNQLYNELNLGRREEYDVLDKRRGRDPEMGGKPRR |
| | | KNPQEGLYNELQKDKMAEAYSEIGMKGERRRGKGHDGLYQGLSTA |
| | | TKDTYDALHMQALPPR |
| 139109-nt | 874 | ATGGCCCTCCCTGTCACCGCCCTGCTGCTTCCGCTGGCTCTTCTGC |
| Full CAR | | TCCACGCCGCTCGGCCCGAAGTGCAATTGGTGGAATCAGGGGGA |
| | | GGACTTGTGCAGCCTGGAGGATCGCTGAGACTGTCATGTGCCGTG |
| | | TCCGGCTTTGCCCTGTCCAACCACGGGATGTCCTGGGTCCGCCGC |
| | | GCGCCTGGAAAGGGCCTCGAATGGGTGTCGGGTATTGTGTACAGC |
| | | GGTAGCACCTACTATGCCGCATCCGTGAAGGGGAGATTCACCATC |
| | | AGCCGGGACAACTCCAGGAACACTCTGTACCTCCAAATGAATTCG |
| | | CTGAGGCCAGAGGACACTGCCATCTACTACTGCTCCGCGCATGGC |
| | | GGAGAGTCCGACGTCTGGGGACAGGGGACCACCGTGACCGTGTC |
| | | TAGCGCGTCCGGCGGAGGCGGCAGCGGGGGTCGGGCATCAGGGG |
| | | GCGGCGGATCGGACATCCAGCTCACCCAGTCCCCGAGCTCGCTGT |
| | | CCGCCTCCGTGGGAGATCGGGTCACCATCACGTGCCGCGCCAGCC |
| | | AGTCGATTTCCTCCTACCTGAACTGGTACCAACAGAAGCCCGGAA |
| | | AAGCCCCGAAGCTTCTCATCTACGCCGCCTCGAGCCTGCAGTCAG |
| | | GAGTGCCCTCACGGTTCTCCGGCTCCGGTTCCGGTACTGATTTCAC |
| | | CCTGACCATTTCCTCCCTGCAACCGGAGGACTTCGCTACTTACTAC |
| | | TGCCAGCAGTCGTACTCCACCCCCTACACTTTCGGACAAGGCACC |
| | | AAGGTCGAAATCAAGACCACTACCCCAGCACCGAGGCCACCCAC |
| | | CCCGGCTCCTACCATCGCCTCCCAGCCTCTGTCCCTGCGTCCGGA |
| | | GGCATGTAGACCCGCAGCTGGTGGGGCCGTGCATACCCGGGGTCT |
| | | TGACTTCGCCTGCGATATCTACATTTGGGCCCCTCTGGCTGGTACT |
| | | TGCGGGGTCCTGCTGCTTTCACTCGTGATCACTCTTTACTGTAAGC |
| | | GCGGTCGGAAGAAGCTGCTGTACATCTTTAAGCAACCCTTCATGA |
| | | GGCCTGTGCAGACTACTCAAGAGGAGGACGGCTGTTCATGCCGGT |
| | | TCCCAGAGGAGGAGGAAGGCGGCTGCGAACTGCGCGTGAAATTC |
| | | AGCCGCAGCGCAGATGCTCCAGCCTACAAGCAGGGGCAGAACCA |
| | | GCTCTACAACGAACTCAATCTTGGTCGGAGAGAGGAGTACGACG |
| | | TGCTGGACAAGCGGAGAGGACGGGACCCAGAAATGGGCGGGAA |
| | | GCCGCGCAGAAAGAATCCCCAAGAGGGCCTGTACAACGAGCTCC |
| | | AAAAGGATAAGATGGCAGAAGCCTATAGCGAGATTGGTATGAAA |
| | | GGGGAACGCAGAAGAGGCAAAGGCCACGACGGACTGTACCAGG |
| | | GACTCAGCACCGCCACCAAGGACACCTATGACGCTCTTCACATGC |
| | | AGGCCCTGCCGCCTCGG |

139103

| | | |
|---|---|---|
| 139103-aa | 849 | MALPVTALLLPLALLLHAARPQVQLVESGGGLVQPGRSLRLSCAAS |
| Full CAR | | GFTFSNYAMSWVRQAPGKGLGWVSGISRSGENTYYADSVKGRFTIS |
| | | RDNSKNTLYLQMNSLRDEDTAVYYCARSPAHYYGGMDVWGQGTT |
| | | VTVSSASGGGGSGGRASGGGGSDIVLTQSPGTLSLSPGERATLSCRAS |
| | | QSISSSFLAWYQQKPGQAPRLLIYGASRRATGIPDRFSGSGSGTDFTL |
| | | TISRLEPEDSAVYYCQQYHSSPSWTFGQGTKLEIKTTTPAPRPPTPAPT |
| | | IASQPLSLRPEACKPAAGGAVHTRGLDFACDIYIWAPLAGTCGVLLL |
| | | SLVITLYCKRGRKKLLYIFKQPFMRPVQTTQEEDGCSCRFPEEEEGGC |
| | | ELRVKFSRSADAPAYKQCONQLYNELNLGRREEYDVLDKRRGRDPE |
| | | MGGKPRRKNPQEGLYNELQKDKMAEAYSEIGMKGERRRGKGHDG |
| | | LYQGLSTATKDTYDALHMQALPPR |
| 139103-nt | 864 | ATGGCCCTCCCTGTCACCGCCCTGCTGCTTCCGCTGGCTCTTCTGC |
| Full CAR | | TCCACGCCGCTCGGCCCCAAGTGCAACTCGTGGAATCTGGTGGAG |
| | | GACTCGTGCAACCCGGAAGATCGCTTAGACTGTCGTGTGCCGCCA |
| | | GCGGGTTCACTTTCTCGAACTACGCGATGTCCTGGGTCCGCCAGG |
| | | CACCCGGAAAGGGACTCGGTTGGGTGTCCGGCATTTCCCGGTCCG |
| | | GCGAAAATACCTACTACGCCGACTCCGTGAAGGGCCGCTTCACCA |
| | | TCTCAAGGGACAACAGCAAAAACACCCTGTACTTGCAAATGAAC |
| | | TCCCTGCGGGATGAAGATACAGCCGTGTACTATTGCGCCCGGTCG |
| | | CCTGCCCATTACTACGGCGGAATGGACGTCTGGGGACAGGGAAC |
| | | CACTGTGACTGTCAGCAGCGCGTCGGGTGGCGGCGGCTCAGGGG |
| | | GTCGGGCCTCCGGGGGGGGAGGGTCCGACATCGTGCTGACCCAG |
| | | TCCCCGGGAACCCTGAGCCTGAGCCCGGGAGAGCGCGCGACCCT |
| | | GTCATGCCGGGCATCCCAGAGCATTAGCTCCTCCTTTCTCGCCTG |
| | | GTATCAGCAGAAGCCCGGACAGGCCCCGAGGCTGCTGATCTACG |
| | | GCGCTAGCAGAAGGGCTACCGGAATCCCAGACCGGTTCTCCGGCT |
| | | CCGGTTCCGGGACCGATTTCACCCTTACTATCTCGCGCCTGGAAC |
| | | CTGAGGACTCCGCCGTCTACTACTGCCAGCAGTACCACTCATCCC |
| | | CGTCGTGGACGTTCGGACAGGGCACCAAGCTGGAGATTAAGACC |
| | | ACTACCCCAGCACCGAGGCCACCCACCCCGGCTCCTACCATCGCC |
| | | TCCCAGCCTCTGTCCCTGCGTCCGGAGGCATGTAGACCCGCAGCT |
| | | GGTGGGGCCGTGCATACCCGGGGTCTTGACTTCGCCTGCGATATC |
| | | TACATTTGGGCCCCTCTGGCTGGTACTTGCGGGGTCCTGCTGCTTT |
| | | CACTCGTGATCACTCTTTACTGTAAGCGCGGTCGGAAGAAGCTGC |
| | | TGTACATCTTTAAGCAACCCTTCATGAGGCCTGTGCAGACTACTC |
| | | AAGAGGAGGACGGCTGTTCATGCCGGTTCCCAGAGGAGGAGGAA |
| | | GGCGGCTGCGAACTGCGCGTGAAATTCAGCCGCAGCGCAGATGC |
| | | TCCAGCCTACAAGCAGGGGCAGAACCAGCTCTACAACGAACTCA |
| | | ATCTTGGTCGGAGAGAGGAGTACGACGTGCTGGACAAGCGGAGA |
| | | GGACGGGACCCAGAAATGGGCGGGAAGCCGCGCAGAAAGAATC |
| | | CCCAAGAGGGCCTGTACAACGAGCTCCAAAAGGATAAGATGGCA |
| | | GAAGCCTATAGCGAGATTGGTATGAAAGGGGAACGCAGAAGAGG |
| | | CAAAGGCCACGACGGACTGTACCAGGGACTCAGCACCGCCACCA |
| | | AGGACACCTATGACGCTCTTCACATGCAGGCCCTGCCGCCTCGG |

139105

| | | |
|---|---|---|
| 139105-aa | 850 | MALPVTALLPLALLLHAARPQVQLVESGGGLVQPGRSLRLSCAAS |
| Full CAR | | GFTFDDYAMHWVRQAPGKGLEWVSGISWNSGSIGYADSVKGRFTIS |
| | | RDNAKNSLYLQMNSLRAEDTALYYCSVHSFLAYWGQGTLVTVSSA |
| | | SGGGGSGGRASGGGGSDIVMTQTPLSLPVTPGEPASISCRSSQSLLHS |
| | | NGYNYLDWYLQKPGQSPQLLIYLGSNRASGVPDRFSGSGSGTDFTL |
| | | KISRVEAEDVGVYYCMQALQTPYTFGQGTKVEIKTTTPAPRPPTPAP |
| | | TIASQPLSLRPEACRPAAGGAVHFRGLDFACDIYIWAPLAGTCGVLL |
| | | LSLVITLYCKRGRKKLLYIFKQPFMRPVQTTQEEDGCSCRFPEEEEGG |
| | | CELRVKFSRSADAPAYKQGQNQLYNELNLGRREEYDVLDKRRGRD |
| | | PEMGGKPRRKNPQEGLYNELQKDKMAEAYSEIGMKGERRRGKGHD |
| | | GLYQGLSTATKDTYDALHMQALPPR |
| 139105-nt | 865 | ATGGCCCTCCCTGTCACCGCCCTGCTGCTTCCGCTGGCTCTTCTGC |
| Full CAR | | TCCACGCCGCTCGGCCCCAAGTGCAACTCGTCGAATCCGGTGGAG |
| | | GTCTGGTCCAACCTGGTAGAAGCCTGAGACTGTCGTGTGCGGCCA |
| | | GCGGATTCACCTTTGATGACTATGCTATGCACTGGGTGCGGCAGG |
| | | CCCCAGGAAAGGGCCTGGAATGGGTGTCGGGAATTAGCTGGAAC |
| | | TCCGGGTCCATTGGCTACGCCGACTCCGTGAAGGGCCGCTTCACC |
| | | ATCTCCCGCGACAACGCAAAGAACTCCCTGTACTTGCAAATGAAC |
| | | TCGCTCAGGGCTGAGGATACCGCGCTGTACTACTGCTCCGTGCAT |
| | | TCCTTCCTGGCCTACTGGGGACAGGGAACTCTGGTCACCGTGTCG |
| | | AGCGCCTCCGGCGGCGGGGGCTCGGGTGGACGGGCCTCGGGCGG |
| | | AGGGGGGTCCGACATCGTGATGACCCAGACCCCGCTGAGCTTGCC |
| | | CGTGACTCCCGGAGAGCCTGCATCCATCTCCTGCCGGTCATCCCA |
| | | GTCCCTTCTCCACTCCAACGGATACAACTACCTCGACTGGTACCT |
| | | CCAGAAGCCGGGACAGAGCCCTCAGCTTCTGATCTACCTGGGGTC |
| | | AAATAGAGCCTCAGGAGTGCCGGATCGGTTCAGCGGATCTGGTTC |
| | | GGGAACTGATTTCACTCTGAAGATTTCCCGCGTGGAAGCCGAGGA |
| | | CGTGGGCGTCTACTACTGTTATGCAGGCGCTGCAGACCCCCTATAC |
| | | CTTCGGCCAAGGGACGAAAGTGGAGATCAAGACCACTACCCCAG |
| | | CACCGAGGCCACCCACCCCGGCTCCTACCATCGCCTCCCAGCCTC |
| | | TGTCCCTGCGTCCGGAGGCATGTAGACCCGCAGCTGGTGGGGCCG |
| | | TGCATACCCGGGGTCTTGACTTCGCCTGCGATATCTACATTTGGG |
| | | CCCCTCTGGCTGGTACTTGCGGGGTCCTGCTGCTTTCACTCGTGAT |
| | | CACTCTTTACTGTAAGCGCGGTCGGAAGAAGCTGCTGTACATCTT |
| | | TAAGCAACCCTTCATGAGGCCTGTGCAGACTACTCAAGAGGAGG |
| | | ACGGCTGTTCATGCCGGTTCCCAGAGGAGGAGGAAGGCGGCTGC |
| | | GAACTGCGCGTGAAATTCAGCCGCAGCGCAGATGCTCCAGCCTAC |
| | | AAGCAGGGGCAGAACCAGCTCTACAACGAACTCAATCTTGGTCG |
| | | GAGAGAGGAGTACGACGTGCTGGACAAGCGGAGAGGACGGGAC |
| | | CCAGAAATGGGCGGGAAGCCGCGCAGAAAGAATCCCCAAGAGG |
| | | GCCTGTACAACGAGCTCCAAAAGGATAAGATGGCAGAAGCCTAT |
| | | AGCGAGATTGGTATGAAAGGGGAACGCAGAAGAGGCAAAGGCC |
| | | ACGACGGACTGTACCAGGGACTCAGCACCGCCACCAAGGACACC |
| | | TATGACGCTCTTCACATGCAGGCCCTGCCGCCTCGG |

139111

| | | |
|---|---|---|
| 139111-aa | 851 | MALPVTALLLPLALLLHAARPEVQLLESGGGLVQPGGSLRLSCAVSG |
| Full CAR | | FALSNHGMSWVRRAPGKGLEWVSGIVYSGSTYYAASVKGRFTISRD |
| | | NSRNTLYLQMNSLRPEDTAIYYCSAHGGESDVWGQGTTVTVSSASG |
| | | GGGSGGRASGGGGSDIVMTQTPLSLSVTPGQPASISCKSSQSLLRND |
| | | GKTPLYWYKKAGQPPQLLIYEVSNRFSGVPDRFSGSGSGTDFTLKIS |
| | | RVEAEDVGAYYCMQNIQFPSFGGGTKLEIKTTTPAPRPPTPAPTIASQ |
| | | PLSLRPEACRPAAGGAVHTRGLDFACDIYIWAPLAGTCGVLLLSLVIT |
| | | LYCKRGRKKLLYIFKQPFMRPVQTTQEEDGCSCRFPEEEEGGCELRV |
| | | KFSRSADAPAYKQGQNQLYNELNLGRREEYDVLDKRRGRDPEMGG |
| | | KPRRKNPQEGLYNELQKDKMAEAYSEIGMKGERRRGKGHDGLYQG |
| | | LSTATKDTYDALHMQALPPR |
| 139111-nt | 866 | ATGGCCCTCCCTGTCACCGCCCTGCTGCTTCCGCTGGCTCTRTGC |
| Full CAR | | TCCACGCCGCTCGGCCCGAAGTGCAATTGTTGGAATCTGGAGGAG |
| | | GACTTGTGCAGCCTGGAGGATCACTGAGACTTTCGTGTGCGGTGT |
| | | CAGGCTTCGCCCTGAGCAACCACGGCATGAGCTGGGTGCGGAGA |
| | | GCCCCGGGGAAGGGTCTGGAATGGGTGTCCGGGATCGTCTACTCC |
| | | GGTTCAACTTACTACGCCGCAAGCGTGAAGGGTCGCTTCACCATT |
| | | TCCCGCGATAACTCCCGGAACACCCTGTACCTCCAAATGAACTCC |
| | | CTGCGGCCCGAGGACACCGCCATCTACTACTGTTCCGCGCATGGA |
| | | GGAGAGTCCGATGTCTGGGGACAGGGCACTACCGTGACCGTGTC |
| | | GAGCGCCTCGGGGGGAGGAGGCTCCGGCGGTCGCGCCTCCGGGG |
| | | GGGGTGGCAGCGACATTGTGATGACGCAGACTCCACTCTCGCTGT |
| | | CCGTGACCCCGGGACAGCCCGCGTCCATCTCGTGCAAGAGCTCCC |
| | | AGAGCCTGCTGAGGAACGACGGAAAGACTCCTCTGTATTGGTACC |
| | | TCCAGAAGGCTGGACAGCCCCCGCAACTGCTCATCTACGAAGTGT |
| | | CAAATCGCTTCTCCGGGGTGCCGGATCGGTTTTCCGGCTCGGGAT |
| | | CGGGCACCGACTTCACCCTGAAAATCTCCAGGGTCGAGGCCGAG |
| | | GACGTGGGAGCCTACTACTGCATGCAAAACATCCAGTTCCCTTCC |
| | | TTCGGCGGCGGCACAAAGCTGGAGATTAAGACCACTACCCCAGC |
| | | ACCGAGGCCACCCACCCCGGCTCCTACCATCGCCTCCCAGCCTCT |
| | | GTCCCTGCGTCCGGAGGCATGTAGACCCGCAGCTGGTGGGGCCGT |
| | | GCATACCCGGGGTCTTGACTTCGCCTGCGATATCTACATTTGGGC |
| | | CCCTCTGGCTGGTACTTGCGGGGTCCTGCTGCTTTCACTCGTGATC |
| | | ACTCTTTACTGTAAGCGCGGTCGGAAGAAGCTGCTGTACATCTTT |
| | | AAGCAACCCTTCATGAGGCCTGTGCAGACTACTCAAGAGGAGGA |
| | | CGGCTGTTCATGCCGGTTCCCAGAGGAGGAGGAAGGCGGCTGCG |
| | | AACTGCGCGTGAAATTCAGCCGCAGCGCAGATGCTCCAGCCTACA |
| | | AGCAGGGGCAGAACCAGCTCTACAACGAACTCAATCTTGGTCGG |
| | | AGAGAGGAGTACGACGTGCTGGACAAGCGGAGAGGACGGGACC |
| | | CAGAAATGGGCGGGAAGCCGCGCAGAAAGAATCCCCAAGAGGG |
| | | CCTGTACAACGAGCTCCAAAAGGATAAGATGGCAGAAGCCTATA |
| | | GCGAGATTGGTATGAAAGGGGAACGCAGAAGAGGCAAAGGCCA |
| | | CGACGGACTGTACCAGGGACTCAGCACCGCCACCAAGGACACCT |
| | | ATGACCTCTCTTCACATGCAGGCCCTGCCGCCTCGG |

139100

| | | |
|---|---|---|
| 139100-aa | 852 | MALPVTALLLPLALLLHAARPQVQLVQSGAEVRKTGASVKVSCKAS |
| Full CAR | | GYIFDNFGINWVRQAPGQGLEWMGWINPKNNNTNYAQKFQGRVTI |
| | | TADESTNTAYMEVSSLRSEDTAVYYCARGPYYYQSYMDVWGQGT |
| | | MVTVSSASGGGGSGGRASGGGGSDIVMTQTPLSLPVTPGEPASISCR |
| | | SSQSLLHSNGYNYLNWYLQKPGQSPQLLIYLGSKRASGVPDRFSGSG |
| | | SGTDFTLHITRVGAEDVGVYYCMQALQTPYTFGQGTKLEIKTTTPAP |
| | | RPPTPAPTIASQPLSLRPEACRPAAGGAVHTRGLDFACDIYIWAPLAG |
| | | TCGVLLLSLVITLYCKRGRKKLLYIFKQPFMRPVQTTQEEDGCSCRFP |
| | | EEEEGGCELRVKFSRSADAPAYKQGQNQLYNELNLGRREEYDVLDK |
| | | RRGRDPEMGGKPRRKNPQEGLYNELQKDKMAEAYSEIGMKGERRR |
| | | GKGHDGLYQGLSTATKDTYDALHMQALPPR |
| 139100-nt | 867 | ATGGCCCTCCCTGTCACCGCCCTGCTGCTTCCGCTGGCTCTTCTGC |
| Full CAR | | TCCACGCCGCTCGGCCCCAAGTCCAACTCGTCCAGTCCGGCGCAG |
| | | AAGTCAGAAAAACCGGTGCTAGCGTGAAAGTGTCCTGCAAGGCC |
| | | TCCGGCTACATTTTCGATAACTTCGGAATCAACTGGGTCAGACAG |
| | | GCCCCGGGCCAGGGGCTGGAATGGATGGGATGGATCAACCCCAA |
| | | GAACAACAACACCAACTACGCACAGAAGTTCCAGGGCCGCGTGA |
| | | CTATCACCGCCGATGAATCGACCAATACCGCCTACATGGAGGTGT |
| | | CCTCCCTGCGGTCGGAGGACACTGCCGTGTATTACTGCGCGAGGG |
| | | GCCCATACTACTACCAAAGCTACATGGACGTCTGGGGACAGGGA |
| | | ACCATGGTGACCGTGTCATCCGCCTCCGGTGGTGGAGGCTCCGGG |
| | | GGGCGGGCTTCAGGAGGCGGAGGAAGCGATATTGTGATGACCCA |
| | | GACTCCGCTTAGCCTGCCCGTCTACTCCTGGAGAACCGGCCTCCAT |
| | | TTCCTGCCGGTCCTCGCAATCACTCCTGCATTCCAACGGTTACAAC |
| | | TACCTGAATTGGTACCTCCAGAACTCCTGGCCAGTCGCCCCAGTTG |
| | | CTGATCTATCTGGGCTCGAAGCGCGCCTCCGGGCTTGCCTGACCGG |
| | | TTTAGCGGATCTGGGAGCGGCACGGACTTCACTCTCCACATCACC |
| | | CGCGTGGGAGCGGAGGACGTGGGAGTGTACTACTGTATGCAGGC |
| | | GCTGCAGACTCCGTACACATTCGGACAGGGCACCAAGCTGGAGA |
| | | TCAAGACCACTACCCCAGCACCGAGGCCACCCACCCCGGCTCCTA |
| | | CCATCGCCTCCCAGCCTCTGTCCCTGCGTCCGGAGGCATGTAGAC |
| | | CCGCAGCTGGTGGGGCCGTGCATACCCGGGGTCTTGACTTCGCCT |
| | | GCGATATCTACATTTGGGCCCCTCTGGCTGGTACTTGCGGGGTCC |
| | | TGCTGCTTTCACTCGTGATCACTCTTTACTGTAAGCGCGGTCGGAA |
| | | GAAGCTGCTGTACATCTTTAAGCAACCCTTCATGAGGCCTGTGCA |
| | | GACTACTCAAGAGGAGGACGGCTGTTCATGCCGGTTCCCAGAGG |
| | | AGGAGGAAGGCGGCTGCGAACTGCGCGTGAAATTCAGCCGCAGC |
| | | GCAGATGCTCCAGCCTACAAGCAGGGGCAGAACCAGCTCTACAA |
| | | CGAACTCAATCTTGGTCGGAGAGAGGAGTACGACGTGCTGGACA |
| | | AGCGGAGAGGACGGGACCCAGAAATGGCTCGGGAAGCCCTCGCAG |
| | | AAAGAATCCCCAAGAGGGCCTGTACAACGACCTCCAAAAGGATA |
| | | AGATGGCAGAAGCCTATAGCGAGATTGGTATGAAAGGGGAACGC |
| | | AGAAGAGGCAAAGGCCACGACCTGACTGTACCAGGGACTCAGCAC |
| | | CGCCACCAAGGACACCTATGACGCTCTTCACATGCAGGCCCTGCC |
| | | GCCTCGG |

139101

| | | |
|---|---|---|
| 139101-aa | 853 | MALPVTALLLPLALLLHAARPQVQLQESGGGLVQPGGSLRLSCAAS |
| Full CAR | | GFTFSSDAMTWVRQAPGKGLEWVSVISGSGGTTYYADSVKGRFTIS |
| | | RDNSKNTLYLQMNSLRAEDTAVYYCAKLDSSGYYYARGPRYWGQ |
| | | GTLVTVSSASGGGGSGGRASGGGGSDIQLTQSPSSLSASVGDRVTITC |
| | | RASQSISSYLNWYQQKPGKAPKLLIYGASTLASGVPARFSGSGSGTH |
| | | FTLTINSLQSEDSATYYCQQSYKRASFGQGTKVEIKTTTPAPRPPTPA |
| | | PTIASQPLSLRPEACRPAAGGAVHTRGLDFACDIYIWAPLAGTCGVL |
| | | LLSLVITLYCKRGRKKLLYIFKQPFMRPVQTTQEEDGCSCRFPEEEEG |
| | | GCELRVKFSRSADAPAYKQGQNQLYNELNLGRREEYDVLDKRRGR |
| | | DPEMGGKPRRKNPQEGLYNELQKDKMAEAYSEIGMKGERRRGKGH |
| | | DGLYQGLSTATKDTYDALHMQALPPR |
| 139101-nt | 868 | ATGGCCCTCCCTGTCACCGCCCTGCTGCTTCCGCTGGCTCTTCTGC |
| Full CAR | | TCCACGCCGCTCGGCCCCAAGTGCAACTTCAAGAATCAGGCGGA |
| | | GGACTCGTGCAGCCCGGAGGATCATTGCGGCTCTCGTGCGCCGCC |
| | | TCGGGCTTCACCTTCTCGAGCGACGCCATGACCTGGGTCCGCCAG |
| | | GCCCCGGGGAAGGGGCTGGAATGGGTGTCTGTGATTTCCGGCTCC |
| | | GGGGGAACTACGTACTACGCCGATTCCGTGAAAGGTCGCTTCACT |
| | | ATCTCCCGGGACAACAGCAAGAACACCCTTTATCTGCAAATGAAT |
| | | TCCCTCCGCGCCGAGGACACCGCCGTGTACTACTGCGCCAAGCTG |
| | | GACTCCTCGGCTCTACTACTATGCCCGGGGTCCGAGATACTGGGGA |
| | | CAGGGAACCCTCGTGACCGTGTCCTCCGCGTCCGGCGGAGGAGG |
| | | GTCGGGAGGGCGGGCCTCCGGCGGCGGCGGTTCGGACATCCAGC |
| | | TGACCCAGTCCCCATCCTCACTGAGCGCAAGCGTGGGCGACAGA |
| | | GTCACCATTACATGCAGGGCGTCCCAGAGCATCAGCTCCTACCTG |
| | | AACTGGTACCAACAGAAGCCTGGAAAGGCTCCTAAGCTGTTGATC |
| | | TACGGGGCTTCGACCCTGGCATCCGGGGTGCCCGCGAGGTTTAGC |
| | | GGAAGCGGTAGCGGCACTCACTTCACTCTGACCATTAACAGCCTC |
| | | CAGTCCGAGGATTCAGCCACTTACTACTGTCAGCAGTCCTACAAG |
| | | CGGGCCAGCTTCGGACAGGGCACTAAGGTCGAGATCAAGACCAC |
| | | TACCCCAGCACCGAGGCCACCCACCCCGGCTCCTACCATCGCCTC |
| | | CCAGCCTCTGTCCCTGCGTCCGGAGGCATGTAGACCCGCAGCTGG |
| | | TGGGGCCGTGCATACCCGGGGTCTTGACTTCGCCTGCGATATCTA |
| | | CATTTGGGCCCCTCTGGCTGGTACTTGCGGGGTCCTGCTGCTTTCA |
| | | CTCGTGATCACTCTTTACTGTAAGCGCGGTCGGAAGAAGCTGCTG |
| | | TACATCTTTAAGCAACCCTTCATGAGGCCTGTGCAGACTACTCAA |
| | | GAGGAGGACGGCTGTTCATGCCGGTTCCCAGAGGAGGAGGAAGG |
| | | CGGCTGCGAACTGCGCGTGAAATTCAGCCGCAGCGCAGATGCTCC |
| | | AGCCTACAAGCAGGGGCAGAACCAGCTCTACAACGAACTCAATC |
| | | TTGGTCGGAGAGAGGAGTACGACGTGCTGGACAAGCGGAGAGGA |
| | | CGGGACCCAGAAATGGGCGGGAAGCCGCGCAGAAAGAATCCCCA |
| | | AGAGGGCCTGTACAACGACCTCCAAAAGGATAAGATGGCAGAAG |
| | | CCTATAGCGAGATTGGTATGAAAGGGGAACGCAGAAGAGGCAAA |
| | | GGCCACGACGGACTGTACCAGGGACTCAGCACCGCCACCAAGGA |
| | | CACCTATGACGCTCTTCACATGCAGGCCCTGCCGCCTCGG |

139102

| | | |
|---|---|---|
| 139102-aa | 854 | MALPVTALLLPLALLLHAARPQVQLVQSGAEVKKPGASVKVSCKAS |
| Full CAR | | GYTFSNYGITWVRQAPGQGLEWMGWISAYNGNTNYAQKFQGRVT |
| | | MTRNTSISTAYMELSSLRSEDTAVYYCARGPYYYYMDVWGKGTMV |
| | | TVSSASGGGGSGGRASGGGGSEIVMTQSPLSLPVTPGEPASISCRSSQ |
| | | SLLYSNGYNYVDWYLQKPGQSPQLLIYLGSNRASGVPDRFSGSGSGT |
| | | DFKLQISRVEAEDVGIYYCMQGRQFPYSFGQGTKVEIKTTTPAPRPPT |
| | | PAPTIASQPLSLRPEACRPAAGGAVHTRGLDFACDIYIWAPLAGTCG |
| | | VLLLSLVITLYCKRGRKKLLYIFKQPFMRPVQTTQEEDGCSCRFPEEE |
| | | EGGCELRVKFSRSADAPAYKQGQNQLYNELNLGRREEYDVLDKRR |
| | | GRDPEMGGKPRRKNPQEGLYNELQKDKMAEAYSEIGMKGERRRGK |
| | | GHDGLYQGLSTATKDTYDALHMQALPPR |
| 139102-nt | 869 | ATGGCCCTCCCTGTCACCGCCCTGCTGCTTCCGCTGGCTCTTCTGC |
| Full CAR | | TCCACGCCGCTCGGCCCCAAGTCCAACTGGTCCAGAGCGGTGCAG |
| | | AAGTGAAGAAGCCCGGAGCGAGCGTGAAAGTGTCCTGCAAGGCT |
| | | TCCGGGTACACCTTCTCCAACTACGGCATCACTTGGGTGCGCCAG |
| | | GCCCCGGGACAGGGCCTGGAATGGATGGGGTGGATTTCCGCGTA |
| | | CAACGGCAATACGAACTACGCTCAGAAGTTCCAGGGTAGAGTGA |
| | | CCATGACTAGGAACACCTCCATTTCCACCGCCTACATGGAACTGT |
| | | CCTCCCTGCGGAGCGAGGACACCGCCGTGTACTATTGCGCCCGGG |
| | | GACCATACTACTACTACATGGATGTCTGGGGGAAGGGGACTATG |
| | | GTCACCGTGTCATCCGCCTCGGGAGGCGGCGGATCAGGAGGACG |
| | | CGCCTCTGGTGGTGGAGGATCGGAGATCGTGATGACCCAGAGCC |
| | | CTCTCTCCTGCCCGTGACTCCTGGGGAGCCCGCATCCATTTCATG |
| | | CCGGAGCTCCCAGMACTTCTCTACTCCAACGGCTATAACTACGT |
| | | GGATTGGTACCTCCAAAAGCCGGGCCAGAGCCCGCAGCTGCTGA |
| | | TCTACCTGGGCTCGAACAGGGCCAGCGGAGTGCCTGACCGGTTCT |
| | | CCGGGTCGGGAAGCGGGACCGACTTCAAGCTGCAAATCTCGAGA |
| | | GTGGAGGCCGAGGACGTGGGAATCTACTACTGTATGCAGGGCCG |
| | | CCAGTTTCCGTACTCGTTCGGACAGGGCACCAAAGTGGAAATCAA |
| | | GACCACTACCCCAGCACCGAGGCCACCCACCCCGGCTCCTACCAT |
| | | CGCCTCCCAGCCTCTGTCCCTGCGTCCGGAGGCATGTAGACCCGC |
| | | AGCTGGTGGGGCCGTGCATACCCGGGGTCTTGACTTCGCCTGCGA |
| | | TATCTACATTTGGGCCCCTCTGGCTGGTACTTGCGGGGTCCTGCTG |
| | | CTTTCACTCGTGATCACTCTTTACTGTAAGCGCGGTCGGAAGAAG |
| | | CTGCTGTACATcTTTAAGCAACCCTTCATGAGGCCTGTGCAGACT |
| | | ACTCAAGAGGAGGACGGCTGTTCATGCCGGTTCCCAGAGGAGGA |
| | | GGAAGGCGGCTGCGAACTGCGCGTGAAATTCAGCCGCAGCGCAG |
| | | ATGCTCCAGCCTACAAGCAGGGGCAGAACCAGCTCTACAACGAA |
| | | CTCAATCTTGGTCGGAGAGAGGAGTACGACGTGCTGGACAAGCG |
| | | GAGAGGACGGGACCCAGAAATGGGCGGGAAGCCGCGCAGAAAG |
| | | AATCCCCAAGAGGGCCTGTACAACGAGCTCCAAAAGGATAAGAT |
| | | GGCAGAAGCCTATAGCGAGATTGGTATGAAAGGGGAACGCAGAA |
| | | GAGGCAAAGGCCACGACGGACTGTACCAGGGACTCAGCACCGCC |
| | | ACCAAGGACACCTATGACGCTCTTCACATGCAGGCCCTGCCGCCT |
| | | CGG |

139104

| | | |
|---|---|---|
| 139104-aa | 855 | MALPVTALLLPLALLLHAARPEVQLLETGGGLVQPGGSLRLSCAVSG |
| Full CAR | | FALSNHGMSWVRRAPGKGLEWVSGIVYSGSTYYAASVKGRFTISRD |
| | | NSRNTLYLQMNSLRPEDTAIYYCSAHGGESDVWGQGTTVTVSSASG |
| | | GGGSGGRASGGGGSEIVLTQSPATLSVSPGESATLSCRASQSVSSNLA |
| | | WYQQKPGQAPRLLIYGASTRASGIPDRFSGSGSGTDFTLTISSLQAED |
| | | VAVYYCQQYGSSLTFGGGTKVEIKTTTPAPRPPTPAPTIASQPLSLRP |
| | | EACRPAAGGAVHTRGLDFACDIYIWAPLAGTCGVLLLSLVITLYCKR |
| | | GRKKLLYIFKQPFMRPVQTTQEEDGCSCRFPEEEEGGCELRVKFSRS |
| | | ADAPAYKQGQNQLYNELNLGRREEYDVLDKRRGRDPEMGGKPRRK |
| | | NPQEGLYNELQKDKMAEAYSEIGMKGERRRGKGHDGLYQGLSTAT |
| | | KDTYDALHMQALPPR |
| 139104-nt | 870 | ATGGCCCTCCCTGTCACCGCCCTGCTGCTTCCGCTGGCTCTTCTGC |
| Full CAR | | TCCACGCCGCTCGGCCCGAAGTGCAATTGCTCGAAACTGGAGGA |
| | | GGTCTGGTGCAACCTGGAGGATCACTTCGCCTGTCCTGCGCCGTG |
| | | TCGGGCTTTGCCCTGTCCAACCATGGAATGAGCTGGGTCCGCCGC |
| | | GCGCCGGGGAAGGGCCTCGAATGGGTGTCCGGCATCGTCTACTCC |
| | | GGCTCCACCTACTACGCCGCGTCCGTGAAGGGCCGGTTCACGATT |
| | | TCACGGGACAACTCGCGGAACACCCTGTACCTCCAAATGAATTCC |
| | | CTTCGGCCGGAGGATACTGCCATCTACTACTGCTCCGCCCACGGT |
| | | GGCGAATCCGACGTCTGGGGCCAGGGAACCACCGTGACCGTGTC |
| | | CAGCGCGTCCGGGGGAGGAGGAAGCGGGGGTAGAGCATCGGGTG |
| | | GAGGCGGATCAGAGATCGTGCTGACCCAGTCCCCCGCCACCTTGA |
| | | GCGTGTCACCAGGAGAGTCCGCCACCCTGTCATGCCGCGCCAGCC |
| | | AGTCCGTGTCCTCCAACCTGGCTTGGTACCAGCAGAAGCCGGGGC |
| | | AGGCCCCTAGACTCCTGATCTATGGGGCGTCGACCCGGGCATCTG |
| | | GAATTCCCGATAGGTTCAGCGGATCGGGCTCGGGCACTGACTTCA |
| | | CTCTGACCATCTCCTCGCTGCAAGCCGAGGACGTGGCTGTGTACT |
| | | ACTGTCAGCAGTACGGAAGCTCCCTGACTTTCGGTGGCGGGACCA |
| | | AAGTCGAGATTAAGACCACTACCCCAGCACCGAGGCCACCCACC |
| | | CCGGCTCCTACCATCGCCTCCCAGCCTCTGTCCCTGCGTCCGGAG |
| | | GCATGTAGACCCGCAGCTGGTGGGGCCGTGCATACCCGGGGTCTT |
| | | GACTTCGCCTGCGATATCTACATTTGGGCCCCTCTGGCTGGTACTT |
| | | GCGGGGTCCTGCTGCMCACTCGTGATCACTCTTTACTGTAAGCG |
| | | CGGTCGGAAGAAGCTGCTGTACATCTTTAAGCAACCCTTCATGAG |
| | | GCCTGTGCAGACTACTCAAGAGGAGGACGGCTGTTCATGCCGGTT |
| | | CCCAGAGGAGGAGGAAGGCGGCTGCGAACTGCGCGTGAAATTCA |
| | | GCCGCAGCGCAGATGCTCCAGCCTACAAGCAGGGGCAGAACCAG |
| | | CTCTACAACGAACTCAATCTTGGTCGGAGAGAGGAGTACGACGT |
| | | GCTGGACAAGCGGAGAGGACGGGACCCAGAAATGGGCGGGAAG |
| | | CCGCGCAGAAAGAATCCCCAAGAGGGCCTGTACAACGAGCTCCA |
| | | AAAGGATAAGATGGCAGAAGCCTATAGCGAGATTGGTATGAAAG |
| | | GGGAACGCAGAAGAGGCAAAGGCCACGACGGACTGTACCAGGG |
| | | ACTCAGCACCGCCACCAAGGACACCTATGACGCTCTTCACATGCA |
| | | GGCCCTGCCGCCTCGG |

139106

| | | |
|---|---|---|
| 139106-aa | 856 | MALPVTALLLPLALLLHAARPEVQLVETGGGLVQPGGSLRLSCAVS |
| Full CAR | | GFALSNHGMSWVRRAPGKGLEWVSGIVYSGSTYYAASVKGRFTISR |
| | | DNSRNTLYLQMNSLRPEDTAIYYCSAHGGESDVWGQGTTVTVSSAS |
| | | GGGGSGGRASGGGGSEIVMTQSPATLSVSPGERATLSCRASQSVSSK |
| | | LAWYQQKPGQAPRLLMYGASIRATGIPDRFSGSGSGTEFTLTISSLEP |
| | | EDFAVYYCQQYGSSSWTFGQGTKVEIKTTTPAPRPPTPAPTIASQPLS |
| | | LRPEACRPAAGGAVHTRGLDFACDIYIWAPLAGTCGVLLLSLVITLY |
| | | CKRGRKKLLYIFKQPFMRPVQTTQEEDGCSCRFPEEEEGGCELRVKF |
| | | SRSADAPAYKQGQNQLYNELNLGRREEYDVLDKRRGRDPEMGGKP |
| | | RRKNPQEGLYNELQKDKMAEAYSEIGMKGERRRGKGHDGLYQGLS |
| | | TATKDTYDALHMQALPPR |
| 139106-nt | 871 | ATGGCCCTCCCTGTCACCGCCCTGCTGCTTCCGCTGGCTCTTCTGC |
| Full CAR | | TCCACGCCGCTCGGCCCGAAGTGCAATTGGTGGAAACTGGAGGA |
| | | GGACTTGTGCAACCTGGAGGATCATTGAGACTGAGCTGCGCAGTG |
| | | TCGGGATTCGCCCTGAGCAACCATGGAATGTCCTGGGTCAGAAGG |
| | | GCCCCTGGAAAAGGCCTCGAATGGGTGTCAGGGATCGTGTACTCC |
| | | GGTTCCACTTACTACGCCGCCTCCGTGAAGGGGCGCTTCACTATC |
| | | TCACGGGATAACTCCCGCAATACCCTGTACCTCCAAATGAACAGC |
| | | CTGCGGCCGGAGGATACCGCCATCTACTACTGTTCCGCCCACGGT |
| | | GGAGAGTCTGACGTCTGGGGCCAGGGAACTACCGTGACCGTGTC |
| | | CTCCGCGTCCGGCGGTGGAGGGAGCGGCGGCCGCGCCAGCGGCG |
| | | GCGGAGGCTCCGAGATCGTGATGACCCAGAGCCCCGCTACTCTGT |
| | | CGGTGTCGCCCGGAGAAAGGGCGACCCTGTCCTGCCGGGCGTCG |
| | | CAGTCCGTGAGCAGCAAGCTGGCTTGGTACCAGCAGAAGCCGGG |
| | | CCAGGCACCACGCCTGCTTATGTACGGTGCCTCCATTCGGGCCAC |
| | | CGGAATCCCGGACCGGTTCTCGGGGTCGGGGTCCGGTACCGAGTT |
| | | CACACTGACCATTTCCTCCTCTCGAGCCCGAGGACTTTGCCGTCTA |
| | | TTACTGCCAGCAGTACGGCTCCTCCTCATGGACGTTCGGCCAGGG |
| | | GACCAAGGTCGAAATCAAGACCACTACCCCAGCACCGAGGCCAC |
| | | CCACCCCGGCTCCTACCATCGCCTCCCAGCCTCTGTCCCTGCGTCC |
| | | GGAGGCATGTAGACCCGCAGCTGGTGGGGCCGTGCATACCCGGG |
| | | GTCTTGACTTCGCCTGCGATATCTACATTTGGGCCCCTCTGGCTGG |
| | | TACTTGCGGGGTCCTGCTGCTTTCACTCGTGATCACTCTTTACTGT |
| | | AAGCGCCTCTTCGGAAGAAGCTGCTGTACATCTTTAAGCAACCCTTC |
| | | ATGAGGCCTGTGCAGACTACTCAAGAGGAGGACGGCTGTTCATG |
| | | CCGGTTTCCCAGAGGAGGAGGAAGGCGGCTGCGAACTGCGCGTGA |
| | | AATTCAGCCGCAGCGCAGATGCTCCAGCCTACAAGCAGGGGCAG |
| | | AACCAGCTCTACAACGAACTCAATCTTGGTCGGAGAGAGGAGTA |
| | | CGACGTGCTGGACAAGCGGAGAGGACCTGGACCCAGAAATGGGCG |
| | | GGAAGCCGCGCAGAAAGAATCCCCAAGAGGGCCTGTACAACGAG |
| | | CTCCAAAAGGATAAGATGGCAGAAGCCTATAGCGAGATTGGTAT |
| | | GAAAGGGGAACGCAGAAGAGGCAAAGGCCACGACGGACTGTAC |
| | | CAGGGACTCAGCACCGCCACCAAGGACACCTATGACGCTCTTCAC |
| | | ATGCAGGCCCTGCCGCCTCGG |

139107

| | | |
|---|---|---|
| 139107-aa | 857 | MALPVTALLLPLALLLHAARPEVQLVETGGGVVQPGGSLRLSCAVS |
| Full CAR | | GFALSNHGMSWVRRAPGKGLEWVSGIVYSGSTYYAASVKGRFTISR |
| | | DNSRNTLYLQMNSLRPEDTAIYYCSAHGGESDVWGQGTTVTVSSAS |
| | | GGGGSGGRASGGGGSEIVLTQSPGTLSLSPGERATLSCRASQSVGST |
| | | NLAWYQQKPGQAPRLLIYDASNRATGIPDRFSGGGSGTDFTLTISRLE |
| | | PEDFAVYYCQQYGSSPPWTFGQGTKVEIKTTTPAPRPPTPAPTIASQP |
| | | LSLRPEACRPAAGGAVHTRGLDFACDIYIWAPLAGTCGVLLLSLVIT |
| | | LYCKRGRKKLLYIFKQPFMRPVQTTQEEDGCSCRFPEEEEGGCELRV |
| | | KFSRSADAPAYKQGQNQLYNELNLGRREEYDVLDKRRGRDPEMGG |
| | | KPRRKNPQEGLYNELQKDKMAEAYSEIGMKGERRRGKGHDGLYQG |
| | | LSTATKDTYDALHMQALPPR |
| 139107-nt | 872 | ATGGCCCTCCCTGTCACCGCCCTGCTGCTTCCGCTGGCTCTTCTGC |
| Full CAR | | TCCACGCCGCMGGCCCGAAGTGCAATTGGTGGAGACTGGAGGA |
| | | GGAGTGGTGCAACCTGGAGGAAGCCTGAGACTGTCATGCGCGGT |
| | | GTCGGGCTTCGCCCTCTCCAACCACGGAATGTCCTGGGTCCGCCG |
| | | GGCCCCTGGGAAAGGACTTGAATGGGTGTCCGGCATCGTGTACTC |
| | | GGGTTCCACCTACTACGCGGCCTCAGTGAAGGGCCGGTTTACTAT |
| | | TAGCCGCGACAACTCCAGAAACACACTGTACCTCCAAATGAACTC |
| | | GCTGCGGCCGGAAGATACCGCTATCTACTACTGCTCCGCCCATGG |
| | | GGGAGAGTCGGACGTCTGGGGACAGGGCACCACTGTCACTGTGT |
| | | CCAGCGCTTCCGGCGGTGGTGGAAGCGGGGGACGGGCCTCAGGA |
| | | GGCGGTGGCAGCGAGATTGTGCTGACCCAGTCCCCCGGGACCCTG |
| | | AGCCTGTCCCCGGGAGAAAGGGCCACCCTCTCCTGTCGGGCATCC |
| | | CAGTCCGTGGGGTCTACTAACCTTGCATGGTACCAGCAGAAGCCC |
| | | GGCCAGGCCCCTCGCCTGCTGATCTACGACGCGTCCAATAGAGCC |
| | | ACCGGCATCCCGGATCGCTTCAGCGGAGGCGGATCGGGCACCGA |
| | | CTTCACCCTCACCATTTCAAGGCTGGAACCGGAGGACTTCGCCGT |
| | | GTACTACTGCCAGCAGTATGGTTCGTCCCCACCCTGGACGTTCGG |
| | | CCAGGGGACTAAGGTCGAGATCAAGACCACTACCCCAGCACCGA |
| | | GGCCACCCACCCCGGCTCCTACCATCGCCTCCCAGCCTCTGTCCCT |
| | | GCGTCCGGAGGCATGTAGACCCGCAGCTGGTGGGGCCGTGCATA |
| | | CCCGGGGTCTTGACTTCGCCTGCGATATCTACATTTGGGCCCCTCT |
| | | GGCTGGTACTTGCGGGGTCCTGCTGCTTTCACTCGTGATCACTCTT |
| | | TACTGTAAGCGCGGTCGGAAGAAGCTGCTGTACATCTTTAAGCAA |
| | | CCCTTCATGAGGCCTGTGCAGACTACTCAAGAGGAGGACGGCTGT |
| | | TCATGCCGGTTCCCAGAGGAGGAGGAAGGCGGCTGCGAACTGCG |
| | | CGTGAAATTCAGCCGCAGCGCAGATGCTCCAGCCTACAAGCAGG |
| | | GGCAGAACCAGCTCTACAACGAACTCAATCTTGGTCGGAGAGAG |
| | | GAGTACGACGTGCTGGACAAGCGGAGAGGACGGGACCCAGAAAT |
| | | GGGCGGGAAGCCGCGCAGAAAGAATCCCCAAGAGGGCCTGTACA |
| | | ACGAGCTCCAAAAGGATAAGATGGCAGAAGCCTATAGCGAGATT |
| | | GGTATGAAAGGGGAACGCAGAAGAGGCAAAGGCCACGACGGAC |
| | | TGTACCAGGGACTCAGCACCGCCACCAAGGACACCTATGACGCTC |
| | | TTCACATGCAGGCCCTGCCGCCTCGG |

139108

| | | |
|---|---|---|
| 139108-aa | 858 | MALPVTALLLPLALLLHAARPQVQLVESGGGLVKPGGSLRLSCAAS |
| Full CAR | | GFTFSDYYMSWIRQAPGKGLEWVSYISSSGSTIYYADSVKGRFTISRD |
| | | NAKNSLYLQMNSLRAEDTAVYYCARESGDGMDVWGQGTTVTVSS |
| | | ASGGGGSGGRASGGGGSDIQMTQSPSSLSASVGDRVTITCRASQSISS |
| | | YLNWYQQKPGKAPKLLIYAASSLQSGVPSRFSGSGSGTDFTLTISSLQ |
| | | PEDFATYYCQQSYTLAFGQGTKVDIKTTTPAPRPPTPAPTIASQPLSL |
| | | RPEACRPAAGGAVHTRGLDFACDIYIWAPLAGTCGVLLLSLVITLYC |
| | | KRGRKKLLYIFKQPFMRPVQTTQEEDGCSCREPEEEEGGCELRVKFS |
| | | RSADAPAYKQGQNQLYNELNLGRREEYDVLDKRRGRDPEMGGKPR |
| | | RKNPQEGLYNELQKDKMAEAYSEIGMKGERRRGKGHDGLYQGLST |
| | | ATKDTYDALHMQALPPR |
| 139108-nt | 873 | ATGGCCCTCCCTGTCACCGCCCTGCTGCTTCCGCTGGCTCTTCTGC |
| Full CAR | | TCCACGCCGCTCGGCCCCAAGTGCAACTCGTGGAATCTGGTGGAG |
| | | GACTCGTGAAACCTGGAGGATCATTGAGACTGTCATGCGCGGCCT |
| | | CGGGATTCACGTTCTCCGATTACTACATGAGCTGGATTCGCCAGG |
| | | CTCCGGGGAAGGGACTGGAATGGGTGTCCTACATTTCCTCATCCG |
| | | GCTCCACCATCTACTACGCGGACTCCGTGAAGGGGAGATTCACCA |
| | | TTAGCCGCGATAACGCCAAGAACAGCCTGTACCTTCAGATGAACT |
| | | CCCTGCGGGCTGAAGATACTGCCGTCTACTACTGCGCAAGGGAGA |
| | | GCGGAGATGGGATGGACGTCTGGGGACAGGGTACCACTGTGACC |
| | | GTGTCGTCGGCCTCCGGCGGAGGGGGTTCGGGTGGAAGGGCCAG |
| | | CGGCGGCGGAGGCAGCGACATCCAGATGACCCAGTCCCCCTCAT |
| | | CGCTGTCCGCCTCCGTGGGCGACCGCGTCACCATCACATGCCGGG |
| | | CCTCACAGTCGATCTCCTCCTACCTCAATTGGTATCAGCAGAAGC |
| | | CCGGAAAGGCCCCTAAGCTTCTGATCTACGCAGCGTCCTCCCTGC |
| | | AATCCGGGGTCCCATCTCGGTTCTCCGGCTCGGGCAGCGGTACCG |
| | | ACTTCACTCTGACCATCTCGAGCCTGCAGCCGGAGGACTTCGCCA |
| | | CTTACTACTGTCAGCAAAGCTACACCCTCGCGTTTGGCCAGGGCA |
| | | CCAAAGTGGACATCAAGACCACTACCCCAGCACCGAGGCCACCC |
| | | ACCCCGGCTCCTACCATCGCCTCCCAGCCTCTGTCCCTGCGTCCGG |
| | | AGGCATGTAGACCCGCAGCTGGTGGGGCCGTGCATACCCGGGGT |
| | | CTTGACTTCGCCTGCGATATCTACATTTGGGCCCCTCTGGCTGGTA |
| | | CTTGCGGGGTCCTGCTGCTTTCACTCGTGATCACTCTTTACTGTAA |
| | | GCGCGGTCGGAAGAAGCTGCTGTACATCTTTAAGCAACCCTTCAT |
| | | GAGGCCTGTGCAGACTACTCAAGAGGAGGACGGCTGTTCATGCC |
| | | GGTTCCCAGAGGAGGAGGAAGGCGGCTGCGAACTGCGCGTGAAA |
| | | TTCAGCCGCAGCGCAGATGCTCCAGCCTACAAGCAGGGGCAGAA |
| | | CCAGCTCTACAACGAACTCAATCTTGGTCGGAGAGAGGAGTACG |
| | | ACGTGCTGGACAAGCGGAGAGGACGGGACCCAGAAATGGGCGG |
| | | GAAGCCGCGCAGAAAGAATCCCCAAGAGGGCCTGTACAACGAGC |
| | | TCCAAAAGGATAAGATGGCAGAAGCCTATAGCGAGATTGGTATG |
| | | AAAGGGGAACGCAGAAGAGGCAAAGGCCACGACGGACTGTACC |
| | | AGGGACTCAGCACCGCCACCAAGGACACCTATGACGCTCTTCACA |
| | | TGCAGGCCCTGCCGCCTCGG |

139110

| | | |
|---|---|---|
| 139110-aa | 860 | MALPVTALLLPLALLLHAARPQVQLVQSGGGLVKPGGSLRLSCAAS |
| Full CAR | | GFTFSDYYMSWIRQAPGKGLEWVSYISSSGNTIYYADSVKGRFTISR |
| | | DNAKNSLYLQMNSLRAEDTAVYYCARSTMVREDYWGQGTLVTVSS |
| | | ASGGGGSGGRASGGGGSDIVLTQSPLSLPVTLCQPASISCKSSESLVH |
| | | NSGKTYLNWFHQRPGQSPRRLIYEVSNRDSGVPDRFTGSGSGTDFTL |
| | | KISRVEAEDVGVYYCMQGTHWPGTFGQGTKLEIKTTTPAPRPPTPAP |
| | | TIASQPLSLRPEACRPAAGGAVHTRGLDFACDIYIWAPLAGTCGVLL |
| | | LSLVITLYCKRGRKKLLYIFKQPFMRPVQTTQEEDGCSCRFPEEEEGG |
| | | CELRVKFSRSADAPAYKQGQNQLYNELNLGRREEYDVLDKRRGRD |
| | | PEMGGKPRRKNPQEGLYNELQKDKMAEAYSEIGMKGERRRGKGHD |
| | | GLYQGLSTATKDTYDALHQALPPR |
| 139110-nt | 875 | ATGGCCCTCCCTGTCACCGCCCTGCTGCTTCCGCTGGCTCTTCTGC |
| Full CAR | | TCCACGCCGCTCGGCCCCAAGTGCAACTGGTGCAAAGCGGAGGA |
| | | GGATTGGTCAAACCCGGAGGAAGCCTGAGACTGTCATGCGCGGC |
| | | CTCTGGATTCACCTTCTCCGATTACTACATGTCATGGATCAGACA |
| | | GGCCCCGGGGAAGGGCCTCGAATGGGTGTCCTACATCTCGTCCTC |
| | | CGGGAACACCATCTACTACGCCGACAGCGTGAAGGGCCGCTTTAC |
| | | CATTTCCCGCGACAACGCAAAGAACTCGCJGTACCTTCAGATGAA |
| | | TTCCCTGCGGGCTGAAGATACCGCGGTGTACTATTGCGCCCGGTC |
| | | CACTATGGTCCGGGAGGACTACTGGGGACAGGGCACACTCGTGA |
| | | CCGTGTCCAGCGCGAGCGGGGGTGGAGGCAGCGGTGGACGCGCC |
| | | TCCGGCGGCGGCGGTTCAGACATCGTGCTGACTCAGTCGCCCCTG |
| | | TCGCTGCCGGTCACCCTGGGCCAACCGGCCTCAATTAGCTGCAAG |
| | | TCCTCGGAGAGCCTGGTGCACAACTCAGGAAAGACTTACCTGAAC |
| | | TGGTTCCATCAGCGGCCTGGACAGTCCCCACGGAGGCTCATCTAT |
| | | GAAGTGTCCAACAGGGATTCGGGGGTGCCCGACCGCTTCACTGGC |
| | | TCCGGGTCCGGCACCGACTTCACCTTGAAAATCTCCAGAGTGGAA |
| | | GCCGAGGACGTGGGCGTGTACTACTGTATGCAGGGTACCCACTGG |
| | | CCTGGAACCTTTGGACAAGGAACTAAGCTCGAGATTAAGACCACT |
| | | ACCCCAGCACCGAGGCCACCCACCCCGGCTCCTACCATCGCCTCC |
| | | CAGCCTCTGTCCCTGCGTCCGGAGGCATGTAGACCCGCAGCTGGT |
| | | GGGGCCGTGCATACCCGGGGTCTTGACTTCGCCTGCGATATCTAC |
| | | ATTTGGGCCCCTCTGGCTGGTACTTGCGGGGTCCTGCTGCTTTCAC |
| | | TCGTGATCACTCTTTACTGTAAGCGCGGTCGGAAGAAGCTGCTGT |
| | | ACATCTTTAAGCAACCCTTCATGAGGCCTGTGCAGACTACTCAAG |
| | | AGGAGGACGGCTGTTCATGCCGGTTCCCAGAGGAGGAGGAAGGC |
| | | GGCTGCGAACTGCGCGTGAAATTCAGCCGCAGCGCAGATGCTCC |
| | | AGCCTACAAGCAGUGGCAGAACCAGGTCTACAACGAACTCAATC |
| | | TTGGTCGGAGAGAGGAGTACGACGTGCTGGACAAGCGGAGAGGA |
| | | CGGGACCCAGAAATGGGCGGGAAGCCGCGCAGAAAGAATCCCCA |
| | | AGAGGGCCTGTACAACGAGCTCCAAAAGGATAAGATGGCAGAAG |
| | | CCTATAGCGAGATTGGTATGAAAGGGGAACGCAGAAGAGGCAAA |
| | | GGCCACGACGGACTGTACCAGGGACTCAGCACCGCCACCAAGGA |
| | | CACCTATGACGCTCTTCACATGCAGGCCCTGCCGCCTCGG |

139112

| | | |
|---|---|---|
| 139112-aa | 861 | MALPVTALLLPLALLLHAARPQVQLVESGGGLVQPGGSLRLSCAVS |
| Full CAR | | GFALSNHGMSWVRRAPGKGLEWVSGIVYSGSTYYAASVKGRFTISR |
| | | DNSRNTLYLQMNSLRPEDTAIYYCSAHGGESDVWGQGTTVTVSSAS |
| | | GGGGSGGRASGGGGSDIRLTQSPSPLSASVGDRVTITCQASEDINKFL |
| | | NWYHQTPGKAPKLLIYDASTLQTGVPSRFSGSGSGTDFTLTINSLQPE |
| | | DIGTYYCQQYESLPLTFGGGTKVEIKTTTPAPRPPTPAPTIASQPLSLR |
| | | PEACRPAAGGAVHTRGLDFACDIYIWAPLAGTCGVLLLSLVITLYCK |
| | | RGRKKLLYIFKQPFMRPVQTTQEEDGCSCRFPEEEEGGCEIJRVKFSR |
| | | SADAPAYKQGQNQLYNELNLGRREEYDVLDKRRGRDPEMGGKPRR |
| | | KNPQEGLYNELQKDKMAEAYSEIGMKGERRRGKGHDGLYQGLSTA |
| | | TKDTYDALHMQALPPR |
| 139112-nt | 876 | ATGGCCCTCCCTGTCACCGCCCTGCTGCTTCCGCTGGCTCTTCTGC |
| Full CAR | | TCCACGCCGCTCGGCCCCAAGTGCAACTCGTGGAATCTGGTGGAG |
| | | GACTCGTGCAACCCGGTGGAAGCCTTAGGCTGTCGTGCGCCGTCA |
| | | GCGGGTTTGCTCTGAGCAACCATGGAATGTCCTGGGTCCGCCGGG |
| | | CACCGGGAAAAGGGCTGGAATGGGTGTCCGGCATCGTGTACAGC |
| | | GGGTCAACCTATTACGCCGCGTCCGTGAAGGGCAGATTCACTATC |
| | | TCAAGAGACAACAGCCGGAACACCCTGTACTTGCAAATGAATTCC |
| | | CTGCGCCCCGAGGACACCGCCATCTACTACTGCTCCGCCCACGGA |
| | | GGAGAGTCGGACGTGTGGGGCCAGGGAACGACTGTGACTGTGTC |
| | | CAGCGCATCAGGAGGGGGTGGTTCGGGCGGCCGGGCCTCGGGGG |
| | | GAGGAGGTTCCGACATTCGGCTGACCCAGTCCCCGTCCCCACTGT |
| | | CGGCCTCCGTCGGCGACCGCGTGACCATCACTTGTCAGGCGTCCG |
| | | AGGACATTAACAAGTTCCTGAACTGGTACCACCAGACCCCTGGAA |
| | | AGGCCCCCAAGCTGCTGATCTACGATGCCTCGACCCTTCAAACTG |
| | | GAGTGCCTAGCCGGTTCTCCGGGTCCGGCTCCGGCACTGATTTCA |
| | | CTCTGACCATCAACTCATTGCAGCCGGAAGATATCGGGACCTACT |
| | | ATTGCCAGCAGTACGAATCCCTCCCGCTCACATTCGGCGGGGGAA |
| | | CCAAGGTCGAGATTAAGACCACTACCCCAGCACCGAGGCCACCC |
| | | ACCCCGGCTCCTACCATCGCCTCCCAGCCTCTGTCCCTGCGTCCGG |
| | | AGGCATGTAGACCCGCAGCTGGTGGGGCCGTGCATACCCGGGGT |
| | | CTTGACTTCGCCTGCGATATCTACATTTGGGCCCCTCTGGCTGGTA |
| | | CTTGCGGGGTCCTGCTGCTTTCACTCGTGATCACTCTTTACTGTAA |
| | | GCGCGGTCGGAAGAAGCTGCTGTACATCTTTAAGCAACCCTTCAT |
| | | GAGGCCTGTGCAGACTACTCAAGAGGAGGACGGCTGTTCATGCC |
| | | GGTTCCCAGAGGAGGAGGAAGGCGGCTGCGAACTGCGCGTGAAA |
| | | TTCAGCCGCAGCGCAGATGCTCCAGCCTACAAGCAGGGGCAGAA |
| | | CCAGCTCTACAACGAACTCAATCTTGGTCGGAGAGAGGAGTACG |
| | | ACGTGCTGGACAAGCGGAGAGGACGGGACCCAGAAATGGGCGG |
| | | GAAGCCGCGCAGAAAGAATCCCCAAGAGGGCCTGTACAACGAGC |
| | | TCCAAAAGGATAAGATGGCAGAAGCCTATAGCGAGATTGGTATG |
| | | AAAGGGGAACGCAGAAGAGGCAAAGGCCACGACGGACTGTACC |
| | | AGGGACTCAGCACCGCCACCAAGGACACCTATGACGCTCTTCACA |
| | | TGCAGGCCCTGCCGCCTCGG |

139113

| | | |
|---|---|---|
| 139113-aa | 862 | MALPVTALLLPLALLLHAARPEVLETGGGLVQPGGSLRLSCAVS |
| Full CAR | | GFALSNHGMSWVRRAPGKGLEWVSGIVYSGSTYYAASVKGRFTISR |
| | | DNSRNTLYLQMNSLRPEDTAIYYCSAHGGESDVWGQGTTVTVSSAS |
| | | GGGGSGGRASGGGGSETTLTQSPATLSVSPGERATLSCRASQSVGSN |
| | | LAWYQQKPGQGPRLLIYGASTRATGIPARFSGSGSGTEFTLTISSLQP |
| | | EDFAVYYCQQYNDWLPVTFGQGTKVEIKTTTPAPRPPTPAPTIASQP |
| | | LSLRPEACRPAAGGAVHTRGLDFACDIYIWAPLAGTCGVLLLSLVIT |
| | | LYCKRGRKKLLYIFKQPFMRPVQTTQEEDGCSCRFPEEEEGGCELRV |
| | | KFSRSADAPAYKQGQNQLYNELNLGRREEYDVLDKRRGRDPEMGG |
| | | KPRRKNPQEGLYNELQKDKMAEAYSEIGMKGERRRGKGHDGLYQG |
| | | LSTATKDTYDALHMQALPPR |
| 139113-nt | 877 | ATGGCCCTCCCTGTCACCGCCCTGCTGCTTCCGCTGGCTCTTCTGC |
| Full CAR | | TCCACGCCGCTCGGCCCGAAGTGCAATTGGTGGAAACTGGAGGA |
| | | GGACTTGTGCAACCTGGAGGATCATTGCGGCTCTCATGCGCTGTC |
| | | TCCGGCTTCGCCCTGTCAAATCACGGGATGTCGTGGGTCAGACGG |
| | | GCCCCGGGAAAGGGTCTGGAATGGGTGTCGGGGATTGTGTACAG |
| | | CGGCTCCACCTACTACGCCGCTTCGGTCAAGGGCCGCTTCACTAT |
| | | TTCACGGGACAACAGCCGCAACACCCTCTATCTGCAAATGAACTC |
| | | TCTCCGCCCGGAGGATACCGCCATCTACTACTGCTCCGCACACGG |
| | | CGGCGAATCCGACGTGTGGGGACAGGGAACCACTGTCACCGTGT |
| | | CGTCCGCATCCGGTGGCGGAGGATCGGGTGGCCGGGCCTCCGGG |
| | | GGCGGCGGCAGCGAGACTACCCTGACCCAGTCCCCTGCCACTCTG |
| | | TCCGTGAGCCCGGGAGAGAGAGCCACCCTTAGCTGCCGGGCCAG |
| | | CCAGAGCGTGGGCTCCAACCTGGCCTGGTACCAGCAGAAGCCAG |
| | | GACAGGCTTCCCAGGCTGCTGATCTACGGAGCCTCCACTCGCGCGA |
| | | CCGGCATCCCCGCGAGGTTCTCCGGGTCGGGTTCCGGGACCGAGT |
| | | TCACCCTGACCATCTCCTCCCTCCAACCGGAGGACTTCGCGGTGT |
| | | ACTACTGTCAGCAGTACAACGATTGGCTGCCCGTGACATTTGGAC |
| | | AGGGGACGAAGGTGGAAATCAAAACCACTACCCCAGCACCGAGG |
| | | CCACCCACCCCGGCTCCTACCATCGCCTCCCAGCCTCTGTCCCTGC |
| | | GTCCGGAGGCATGTAGACCCGCAGCTGGTGGGGCCGTGCATACC |
| | | CGGGGTCTTGACTTCGCCTGCGATATCTACATTTGGGCCCCTCTGG |
| | | CTGGTACTTGCGGGGTCCTGCTGCTTTCACTCGTGATCACTCTTTA |
| | | CTGTAAGCGCGGTCGGAAGAAGCTGCTGTACATCTTTAAGCAACC |
| | | CTTCATGAGGCCTGTGCAGACTACTCAAGAGGAGGACGGCTGTTC |
| | | ATGCCGGTTCCCAGAGGAGGAGGAAGGCGGCTGCGAACTGCGCG |
| | | TGAAATTCAGCCGCAGCGCAGATGCTCCAGCCTACAAGCAGGGG |
| | | CAGAACCAGCTCTACAACGAACTCAATCTTGGTCGGAGAGAGGA |
| | | GTACGACGTGCTGGACAAGCGGAGAGGACGGGACCCAGAAATGG |
| | | GCGGGAAGCCGCGCAGAAAGAATCCCCAAGAGGGCCTGTACAAC |
| | | GAGCTCCAAAAGGATAAGATGGCAGAAGCCTATAGCGAGATTGG |
| | | TATGAAAGGGGAACGCAGAAGAGGCAAAGGCCACGACGGACTGT |
| | | ACCAGGGACTCAGCACCGCCACCAAGGACACCTATGACGCTCTTC |
| | | ACATGCAGGCCCTGCCGCCTCGG |

139114

| | | |
|---|---|---|
| 139114-aa | 863 | MALPVTALLLPLALLLHAARPEVQLVESGGGLVQPGGSLRLSCAVS |
| Full CAR | | GFALSNHGMSWVRRAPGKGLEWVSGIVYSGSTYYAASVKGRFTISR |
| | | DNSRNTLYLQMNSLRPEDTAIYYCSAHGGESDVWGQGTTVTVSSAS |
| | | GGGGSGGRASGGGGSEIVLTQSPGTLSLSPGERATLSCRASQSIGSSS |
| | | LAWYQQKPGQAPRLLMYGASSRASGIPDRFSGSGSGTDFTLTISRLEP |
| | | EDFAVYYCQQYAGSPPFTFGQGTKVEIKTTTPAPRPPTPAPTIASQPLS |
| | | LRPEACRPAAGGAVHTRGLDFACDIYIWAPLAGTCGVLLLSLVITLY |
| | | CKRGRKKLLYIFKQPFMRPVQTTQEEDGCSCRFPEEEEGGCELRVKF |
| | | SRSADAPAYKQGQNQLYNELNLGRREEYDVLDKRRGRDPEMGGKP |
| | | RRKNPQEGLYNELQKDKMAEAYSEIGMKGERRRGKGHDGLYQGLS |
| | | TATKDTYDALHMQALPPR |
| 139114-nt | 878 | ATGGCCCTCCCTGTCACCGCCCTGCTGCTTCCGCTGGCTCTTCTGC |
| Full CAR | | TCCACGCCGCTCGGCCCGAAGTGCAATTGGTGGAATCTGGTGGAG |
| | | GACTTGTGCAACCTGGAGGATCACTGAGACTGTCATGCGCGGTGT |
| | | CCGCTTTTTGCCCTGAGCAATCATGGGATGTCGTGGGTCCGGCGCG |
| | | CCCCCGGAAAGGGTCTGGAATGGGTGTCGGGTATCGTCTACTCCG |
| | | GGAGCACTTACTACGCCGCGAGCGTGAAGGGCCGCTTCACCATTT |
| | | CCCGCGATAACTCCCGCAACACCCTGTACTTGCAAATGAACTCGC |
| | | TCCGGCCTGAGGACACTGCCATCTACTACTGCTCCGCACACGGAG |
| | | GAGAATCCGACGTGTGGGGCCAGGGAACTACCGTGACCGTCAGC |
| | | AGCGCCTCCGGCGGCGGGGGCTCAGGCGGACGGGCTAGCGGCGG |
| | | CGGTGGCTCCGAGATCGTGCTGACCCAGTCGCCTGGCACTCTCTC |
| | | GCTGAGCCCCGGGGAAAGGGCAACCCTGTCCTGTCGGGCCAGCC |
| | | AGTCCATTGGATCATCCTCCCTCGCCTGGTATCAGCAGAAACCGG |
| | | GACAGGCTCCGCGGCTGCTTATGTATGGGGCCAGCTCAAGAGCCT |
| | | CCGGCATTCCCGACCGGTTCTCCGGGTCCGGTTCCGGCACCGATT |
| | | TCACCCTGACTATCTCGAGGCTGGAGCCAGAGGACTTCGCCCTTGT |
| | | ACTACTGCCAGCAGTACGCGGGGTCCCCGCCGTTCACGTTCGGAC |
| | | AGGGAACCAAGGTCGAGATCAAGACCACTACCCCAGCACCGAGG |
| | | CCACCCACCCCGGCTCCTACCATCGCCTCCCAGCCTCTGTCCCTGC |
| | | GTCCGGAGGCATGTAGACCCGCAGCTGGTGGGGCCGTGCATACC |
| | | CGGGGTCTTGACTTCGCCTGCGATATCTACATTTGGGCCCCTCTGG |
| | | CTGGTACTTGCGGGGTCCTGCTGCTTTCACTCGTGATCACTCTTTA |
| | | CTGTAAGCGCGGTCGGAAGAAGCTGCTGTACATCTTTAAGCAACC |
| | | CTTCATGAGGCCTGTGCAGACTACTCAAGAGGAGGACGGCTGTTC |
| | | ATGCCGGTTCCCAGAGGAGGAGGAAGGCGGCTGCGAACTGCGCG |
| | | TGAAATTCAGCCGCAGCGCAGATGCTCCAGCCTACAAGCAGGGG |
| | | CAGAACCAGCTCTACAACGAACTCAATCTTGGTCGGAGAGAGGA |
| | | GTACGACGTGCTGGACAAGCGGAGAGGACGGGACCCAGAAATGG |
| | | GCGGGAAGCCGCGCAGAAAGAATCCCCAAGAGGGCCTGTACAAC |
| | | GAGCTCCAAAAGGATAAGATGGCAGAAGCCTATAGCGAGATTGG |
| | | TATGAAAGGGGAACGCAGAAGAGGCAAAGGCCACGACGGACTGT |
| | | ACCAGGGACTCAGCACCGCCACCAAGGACACCTATGACGCTCTTC |
| | | ACATGCAGGCCCTGCCGCCTCGG |

149362

| | | |
|---|---|---|
| 149362-aa | 879 | MALPVTALLLPLALLLHAARPQVQLQESGPGLVKPSETLSLTCTVSG |
| Full CAR | | GSISSSYYMGWIRQPPGKGLEWIGSIYYSGSAYYNPSLKSRVTISVD |
| | | TSKNQFSLRLSSVTAADTAVYYCARHWQEWPDAFDIWGQGTMVTV |
| | | SSGGGGSGGGGSGGGGSETTLTQSPAFMSATPGDKVIISCKASQDID |
| | | DAMNWYQQKPGEAPLFIIQSATSPVPGIPPRFSGSGFGTDFSLTINNIE |
| | | SEDAAYYFCLQHDNFPLTGQGTKLEIKTTTPAPRPPTPAPTIASQPLS |
| | | LRPEACRPAAGGAVHTRGLDFACDIYIWAPLAGTCGVLLLSLVITLY |
| | | CKRGRKKLLYIFKQPFMRPVQTTQEEDGCSCRFPEEEEGGCELRVKF |
| | | SRSADAPAYKQGQNQLYNELNLGRREEYDVLDKRRGRDPEMGGKP |
| | | RRKNPQEGLYNELQKDKMAEAYSEIGMKGERRRGKGHDGLYQGLS |
| | | TATKDTYDALHMQALPPR |
| 149362-nt | 901 | ATGGCCCTCCCTGTCACCGCCCTGCTGCTTCCGCTGGCTCTTCTGC |
| Full CAR | | TCCACGCCGCTCGGCCCCAAGTGCAGCTTCAGGAAAGCGGACCG |
| | | GGCCTGGTCAAGCCATCCGAAACTCTCTCCCTGACTTGCACTGTG |
| | | TCTGGCGGTTCCATCTCATCGTCGTACTACTACTGGGGCTGGATTA |
| | | GGCAGCCGCCCGGAAAGGGACTGGAGTGGATCGGAAGCATCTAC |
| | | TATTCCGGCTCGGCGTACTACAACCCTAGCCTCAAGTCGAGAGTG |
| | | ACCATCTCCGTGGATACCTCCAAGAACCAGTTTTCCCTGCGCCTG |
| | | AGCTCCGTGACCGCCGCTGACACCGCCGTGTACTACTGTGCTCGG |
| | | CATTGGCAGGAATGGCCCGATGCCTTCGACATTTGGGGCCAGGGC |
| | | ACTATGGTCACTGTGTCATCCGGGGGTGGAGGCAGCGGGGGAGG |
| | | AGGGTCCGGGGGGGGAGGTTCAGAGACAACCTTGACCCAGTCAC |
| | | CCGCATTCATGTCCGCCACTCCGGGAGACAAGGTCATCATCTCGT |
| | | GCAAAGCGTCCCAGGATATCGACGATGCCATGAATTGGTACCAG |
| | | CAGAAGCCTGGCGAAGCGCCGCTGTTCATTATCCAATCCGCAACC |
| | | TCGCCCGTGCCTGGAATCCCACCGCGGTTCAGCGGCAGCGGTTTC |
| | | GGAACCGACTTTTCCCTGACCATTAACAACATTGAGTCCGAGGAC |
| | | GCCGCCTACTACTTCTGCCTGCAACACGACAACTTCCCTCTCACGT |
| | | TCGGCCAGGGAACCAAGCTGGAAATCAAGACCACTACCCCAGCA |
| | | CCGAGGCCACCCACCCCGGCTCCTACCATCGCCTCCCAGCCTCTG |
| | | TCCCTGCGTCCGGAGGCATGTAGACCCGCAGCTGGTGGGGCCGTG |
| | | CATACCCGGGGTCTTGACTTCGCCTGCGATATCTACATTTGGGCC |
| | | CCTCTGGCTGGTACTTGCGGGGTCCTGCTGCTTTCACTCGTGATCA |
| | | CTCTTTACTGTAAGCGCGGTCGGAAGAAGCTGCTGTACATCTTTA |
| | | AGCAACCCTTCATGAGGCCTGTGCAGACTACTCAAGAGGAGGAC |
| | | GGCTGTTCATGCCGGTTCCCAGAGGAGGAGGAAGGCGGCTGCGA |
| | | ACTGCGCGTGAAATTCAGCCGCAGCGCAGATGCTCCAGCCTACAA |
| | | GCAGGGGCAGAACCAGCTCTACAACGAACTCAATCTTGGTCGGA |
| | | GAGAGGAGTACGACGTGCTGGACAAGCGGAGAGGACGGGACCC |
| | | AGAAATGGGCGGGAAGCCGCGCAGAAAGAATCCCCAAGAGGGC |
| | | CTGTACAACGAGCTCCAAAAGGATAAGATGGCAGAAGCCTATAG |
| | | CGAGATTGGTATGAAAGGGGAACGCAGAAGAGGCAAAGGCCAC |
| | | GACGGACTGTACCAGGGACTCAGCACCGCCACCAAGGACACCTA |
| | | TGACGCTCTTCACATGCAGGCCCTGCCGCCTCGG |

149363

| | | |
|---|---|---|
| 149363-aa | 880 | MALPVTALLLPLALLLHAARPQVNLRESGPALVKPTQTLTLTCTFSG |
| Full CAR | | FSLRTSGMCVSWIRQPPGKALEWLARIDWDEDKFYSTSLKTRLTISK |
| | | DTSDNQVVLRMTNMDPADTATYYCARSGAGGTSATAFDIWGPGTM |
| | | VTVSSGGGGSGGGGSGGGGSDIQMTQSPSSLSASVGDRVTITCRASQ |
| | | DIYNNLAWFQLKPGSAPRSLMYAANKSQSGVPSRFSGSASGTDFTLT |
| | | ISSLQPEDFATYYCQHYYRFPYSFGQGTKLEIKTTTPAPRPPTPAPTIA |
| | | SQPLSLRPEACRPAAGGAVHTRGLDFACDIYIWAPLAGTCGVLLLSL |
| | | VITLYCKRGRKKLLYIFKQPFMRPVQTTQEEDGCSCRFPEEEEGGCEL |
| | | RVKFSRSADAPAYKQGQNQLYNELNLGRREEYDVLDKRRGRDPEM |
| | | GGKPRRKNPQEGLYNELQKDKMAEAYSEIGMKGERRRGKGHDGLY |
| | | QGLSTATKDTYDALHMQALPPR |
| 149363-nt | 902 | ATGGCCCTCCCTGTCACCGCCCTGCTGCTTCCGCTGGCTCTTCTGC |
| Full CAR | | TCCACGCCGCTCGGCCCCAAGTCAATCTGCGCGAATCCGGCCCCG |
| | | CCTTGGTCAAGCCTACCCAGACCCTCACTCTGACCTGTACTTTCTC |
| | | CGGCTTCTCCCTGCGGACTTCCGGGATGTGCGTGTCCTGGATCAG |
| | | ACAGCCTCCGGGAAAGGCCCTGGAGTGGCTCGCTCGCATTGACTG |
| | | GGATGAGGACAAGTTCTACTCCACCTCACTCAAGACCAGGCTGAC |
| | | CATCAGCAAAGATACCTCTGACAACCAAGTGGTGCTCCGCATGAC |
| | | CAACATGGACCCAGCCGACACTGCCACTTACTACTGCGCGAGGA |
| | | GCGGAGCGGGCGGAACCTCCGCCACCGCCTTCGATATTTGGGGCC |
| | | CGGGTACCATGGTCACCGTGTCAAGCGGAGGAGGGGGGTCCGGG |
| | | GGCGGCGGTTCCGGGGGAGGCGGATCGGACATTCAGATGACTCA |
| | | GTCACCATCGTCCCTGAGCGCTAGCGTGGGCGACAGAGTGACAAT |
| | | CACTTGCCGGGCATCCCAGGACATCTATAACAACCTTGCGTGGTT |
| | | CCAGCTGAAGCCTGGTTCCGCACCGCGGTCACTTATGTACGCCGC |
| | | CAACAAGAGCCAGTCGGGAGTGCCGTCCCGGTTTTCCGGTTCGGC |
| | | CTCGGGAACTGACTTCACCCTGACGATCTCCAGCCTGCAACCCGA |
| | | GGATTTCGCCACCTACTACTGCCAGCACTACTACCGCTTTCCCTAC |
| | | TCGTTCGGACAGGGAACCAAGCTGGAAATCAAGACCACTACCCC |
| | | AGCACCGAGGCCACCCACCCCGGCTCCTACCATCGCCTCCCAGCC |
| | | TCTGTCCCTGCGTCCGGAGGCATGTAGACCCGCAGCTGGTGGGGC |
| | | CGTGCATACCCGGGGTCTTGACTTCGCCTGCGATATCTACATTTG |
| | | GGCCCCTCTGGCTGGTACTTGCGGGGTCCTGCTGCTTTCACTCGTG |
| | | ATCACTCTTTACTGTAAGCGCGCTCGGAAGAAGCTGCTGTACATC |
| | | TTTAAGCAACCCTTCATGAGGCCTGTGCAGACTACTCAAGAGGAG |
| | | GACGGCTGTTCATGCCGGTTCCCAGAGGAGGAGGAAGGCGGCTG |
| | | CGAACTGCGCGTGAAATTCAGCCGCAGGGCAGATGCTCCAGGCTA |
| | | CAAGCAGGGGCAGAACCAGCTCTACAACGAACTCAATCTTGGTC |
| | | GGAGAGAGGAGTACGACGMCMGACAAGCGGAGAGGACCTGGA |
| | | CCCAGAAATGGGCGGGAAGCCGCGCAGAAAGAATCCCCAAGAGG |
| | | GCCTGTACAACGAGCTCCAAAAGGATAAGATGGCAGAAGCCTAT |
| | | AGCGAGATTGGTATGAAAGGGGAACGCAGAAGAGGCAAAGGCC |
| | | ACGACGGACTGTACCAGGGACTCAGCACCGCCACCAAGGACACC |
| | | TATGACGCTCTTCACATGCAGGCCCTGCCGCCTCGG |

149364

| | | |
|---|---|---|
| 149364-aa | 881 | MALPVTALLLPLALLLHAARPEVQLVESGGGLVKPGGSLRLSCAAS |
| Full CAR | | GFTFSSYSMNWVRQAPGKGLEWVSSISSSSSYIYYADSVKGRFTISRD |
| | | NAKNSLYLQMNSLRAEDTAVYYCAKTIAAVYAFDIWGQGTTVTVSS |
| | | GGGGSGGGGSGGGGSEIVLTQSPLSLPVTPEEPASISCRSSQSLLHSNG |
| | | YNYLDWYLQKPGQSPQLLIYLGSNRASGVPDRFSGSGSGTDFTLKIS |
| | | RVEAEDVGVYYCMQALQTPYTFGQGTKLEIKTTTPAPRPPTPAPTIA |
| | | SQPLSLRPEACRPAAGGAVHTRGLDFACDIYIWAPLAGTCGVLLLSL |
| | | VITLYCKRGRKKLLYIFKQPFMRPVQTTQEEDGCSCRFPEEEEGGCEL |
| | | RVKFSRSADAPAYKQGQNQLYNELNLGRREEYDVLDKRRGRDPEM |
| | | GGKPRRKNPQEGLYNELQKDKMAEAYSEIGMKGERRRGKGHDGLY |
| | | QGLSTATKDTYDALHMQALPPR |
| 149364-nt | 903 | ATGGCCCTCCCTGTCACCGCCCTGCTGCTTCCGCTGGCTCTTCTGC |
| Full CAR | | TCCACGCCGCTCGGCCCGAAGTGCAGCTTGTCGAATCCGGGGGGG |
| | | GACTGGTCAAGCCGGGCGGATCACTGAGACTGTCCTGCGCCGCG |
| | | AGCGGCTTCACGTTCTCCTCCTACTCCATGAACTGGGTCCGCCAA |
| | | GCCCCCGGGAAGGGACTGGAATGGGTGTCCTCTATCTCCTCGTCG |
| | | TCGTCCTACATCTACTACGCCGACTCCGTGAAGGGAAGATTCACC |
| | | ATTTGCCGCGAGAACGCAAAGAACTCACTGTACTTGCAAATGAAC |
| | | TCACTCCGGGCCGAAGATACTGCTGTGTACTATTGCGCCAAGACT |
| | | ATTGCCGCCGTCTACGCTTTCGACATCTGGGGCCAGGGAACCACC |
| | | GTGACTGTGTCGTCCGGTGGTGGTGGCTCGGGCGGAGGAGGAAG |
| | | CGGCGGCGGGGGGTCCGAGATTGTGCTGACCCAGTCGCCACTGA |
| | | GCCTCCCTGTGACCCCCGAGGAACCCGCCAGCATCAGCTGCCGGT |
| | | CCAGCCAGTCCCTGCTCCACTCCAACGGATACAATTACCTCGATT |
| | | GGTACCTTCAGAAGCCTGGACAAAGCCCGCAGCTGCTCATCTACT |
| | | TGGGATCAAACCGCGCGTCAGGAGTGCCTGACCGGTTCTCCGGCT |
| | | CGGGCAGCGGTACCGATTTCACCCTGAAAATCTCCAGGGTGGAG |
| | | GCAGAGGACGTGGGAGTGTATTACTGTATGCAGGCGCTGCAGAC |
| | | TCCGTACACATTTGGGCAGGGCACCAAGCTGGAGATCAAGACCA |
| | | CTACCCCAGCACCGAGGCCACCCACCCCGCTCTCCTACCATCGCCT |
| | | CCCAGCCTCTGTCCCTGCGTCCGGAGGCATGTAGACCCGCAGCTG |
| | | GTGGGGCCGTGCATACCCGGGGTCTTGACTTCGCCTGCGATATCT |
| | | ACATTTGGGCCCCTCTGGCTGGTACTTGCGGGGTCCTGCTGCTTTC |
| | | ACTCGTGATCACTCTTTACTGTAAGCGCGGTCGGAAGAAGCTGCT |
| | | GTACATCTTTAAGCAACCCTTCATGAGGCCTGTGCAGACTACTCA |
| | | AGAGGAGGACGGCTGTTCATGCCGGTTCCCAGAGGAGGAGGAAG |
| | | GCGGCTGCGAACTGCGCGTGAAATTCAGCCGCAGCGCAGATGCT |
| | | CCAGCCTACAAGCAGGGGCAGAACCAGCTCTACAACGAACTCAA |
| | | TCTTGGTCGGAGAGAGGAGTACGACGTGCTGGACAAGCGGAGAG |
| | | GACGGGACCCAGAAATGGGCGGGAAGCCGCGCAGAAAGAATCCC |
| | | CAAGAGGGCCTGTACAACGAGCTCCAAAAGGATAAGATGGCAGA |
| | | AGCCTATAGCGAGATTGGTATGAAAGGGGAACGCAGAAGAGGCA |
| | | AAGGCCACGACGGACTGTACCAGGGACTCAGCACCGCCACCAAG |
| | | GACACCTATGACGCTCTTCACATGCAGGCCCTGCCGCCTCGG |

149365

| | | |
|---|---|---|
| 149365-aa | 882 | MALPVTALLLPLALLLHAARPEVQLVESGGGLVKPGGSLRLSCAAS |
| Full CAR | | GFTFSDYYMSWIRQAPGKGLEWVSYISSSGSTIYYADSVKGRFTISRD |
| | | NAKNSLYLQMNSLRAEDTAVYYCARDLRGAFDIWGQGTMVTVSSG |
| | | GGGSGGGGSGGGGSSYVLTQSPSVSAAPGYTATISCGGNNIGTKSVH |
| | | WYQQKPGQAPLLVIRDDSVRPSKIPGRFSGSNSGNMATLTISGVQAG |
| | | DEADFYCQVWDSDSEHVVFGGGTKLTVLTTTPAPRPPTPAPTIASQP |
| | | LSLRPEACRPAAGGAVHTRGLDFACDIYIWAPLAGTCGVLLLSLVIT |
| | | LYCKRGRKKLLYIFKQPFMRPVQTTQEEDGCSCRFPEEEEGGCELRV |
| | | KFSRSADAPAYKQGQNQLYNELNLGRREEYDVLDKRRGRDPEMGG |
| | | KPRRKNPQEGLYNELQKDKMAEAYSEIGMKGERRRGKGHDGLYQG |
| | | LSTATKDTYDALHMQALPPR |
| 149365-nt | 904 | ATGGCCCTCCCTGTCACCGCCCTGCTGCTTCCGCTGGCTCTTCTGC |
| Full CAR | | TCCACGCCGCTCGGCCCGAAGTCCAGCTCGTGGAGTCCGGCGGAG |
| | | GCCTTGTGAAGCCTGGAGGTTCGCTGAGACTGTCCTGCGCCGCCT |
| | | CCGGCTTCACCTTCTCCGACTACTACATGTCCTGGATCAGACAGG |
| | | CCCCGGGAAAGGGCCTGGAATGGGTGTCCTACATCTCGTCATCGG |
| | | GCAGCACTATCTACTACGCGGACTCAGTGAAGGGGCGGTTCACCA |
| | | TTTCCCGGGATAACGCGAAGAACTCGCTGTATCTGCAAATGAACT |
| | | CACTGAGGGCCGAGGACACCGCCGTGTACTACTGCGCCCGCGATC |
| | | TCCGCGGGGCATTTGACATCTGGGGACAGGGAACCATGGTCACA |
| | | GTGTCCAGCGGAGGGGGAGGATCGGGTGGCGGAGGTTCCGGGGG |
| | | TGGAGGCTCCTCCTACGTGCTGACTCAGAGCCCAAGCGTCAGCGC |
| | | TGCGCCCGGTTACACGGCAACCATCTCCTGTGGCGGAAACAACAT |
| | | TGGGACCAAGTCTGTGCACTGGTATCAGCAGAAGCCGGGCCAAG |
| | | CTCCCCTGTTGGTGATCCGCGATGACTCCGTGCGGCCTAGCAAAA |
| | | TTCCGGGACGGTTCTCCGGCTCCAACAGCGGCAATATGGCCACTC |
| | | TCACCATCTCGGGAGTGCAGGCCGGAGATGAAGCCGACTTCTACT |
| | | GCCAAGTCTGGGACTCAGACTCCGAGCATGTGGTGTTCGGGGGCG |
| | | GAACCAAGCTGACTGTGCTCACCACTACCCCAGCACCGAGGCCAC |
| | | CCACCCCGGCTCCTACCATCGCCTCCCAGCCTCTGTCCCTGCGTCC |
| | | GGAGGCATGTAGACCCGCAGCTGGTGGGGCCGTGCATACCCGGG |
| | | GTCTTGACTTCGCCTGCGATATCTACATTTGGGCCCCTCTGGCTGG |
| | | TACTTGCGGGGTCCTGCTGCTTTCACTCGTGATCACTCTTTACTGT |
| | | AAGCGCGGTCGGAAGAAGCTGCTGTACATCTTTAAGCAACCCTTC |
| | | ATGAGGCCTGTGCAGACTACTCAAGAGGAGGACGGCTGTTCATG |
| | | CCGGTTCCCAGAGGAGGAGGAAGGCGGCTGCGAACTGCGCGTGA |
| | | AATTCAGCCGCAGCGCAGATGCTCCAGCCTACAAGCAGGGGCAG |
| | | AACCAGCTCTACAACGAACTCAATCTTGGTCGGAGAGAGGAGTA |
| | | CGACGTGCTGGACAAGCGGAGAGGACGGGACCCAGAAATGGGCG |
| | | GGAAGCCGCGCAGAAAGAATCCCCAAGAGGGCCTGTACAACGAG |
| | | CTCCAAAAGGATAAGATGGCAGAAGCCTATAGCGAGATTGGTAT |
| | | GAAAGGGGAACGCAGAAGAGGCAAAGGCCACGACGGACTGTAC |
| | | CAGGGACTCAGCACCGCCACCAAGGACACCTATGACGCTCTTCAC |
| | | ATGCAGGCCCTGCCGCCTCGG |

149366

| | | |
|---|---|---|
| 149366-aa | 883 | MALPVTALLLPLALLLHAARPQVQLVQSGAEVKKPGASVKVSCKPS |
| Full CAR | | GYTVTSHYIHWVRRAPGQGLEWMGMINPSGGVTAYSQTLQGRVTM |
| | | TSDTSSSTVYMELSSLRSEDTAMYYCAREGSGSGWYFDFWGRGTLV |
| | | TVSSGGGGSGGGGSGGGGSSYVLTQPPSVSVSPGQTASITCSGDGLS |
| | | KKYVSWYQQKAGQSPVVLISRDKERPSGIPDRFSGSNSADTATLTISG |
| | | TQAMDEADYYCQAWDDTTVVFGGGTKLVLTTTPAPRPPTPAPTIA |
| | | SQPLSLRPEACRPAAGGAVHTRGLDFACDIYIWAPLAGTCGVLLLSL |
| | | VITLYCKRGRKKLLYIFKQPFMRPVQTTQEEDGCSCRFPEEEEGGCEL |
| | | RVKFSRSADAPAYKQGQNQLYNELNLGRREEYDVLDKRRGRDPEM |
| | | GGKPRRKNPQEGLYNELQKDKMAEAYSEIGMKGERRRGKGHDGLY |
| | | QGLSTATKDTYDALHMQALPPR |
| 149366-nt | 905 | ATGGCCCTCCCTGTCACCGCCCTGCTGCTTCCGCTGGCTCTTCTGC |
| Full CAR | | TCCACGCCGCTCGGCCCCAAGTGCAGCTGGTGCAGAGCGGGGCC |
| | | GAAGTCAAGAAGCCGGGAGCCTCCGTGAAAGTGTCCTGCAAGCC |
| | | TTCGGGATACACCGTGACCTCCCACTACATTCATTGGGTCCGCCG |
| | | CGCCCCCGGCCAAGGACTCGAGTGGATGGGCATGATCAACCCTA |
| | | GCGGCGGAGTGACCGCGTACAGCCAGACGCTGCAGGGACGCGTG |
| | | ACTATGACCTCGGATACCTCCTCCTCCACCGTCTATATGGAACTGT |
| | | CCAGCCTGCGGTCCGAGGATACCGCCATGTACTACTGCGCCCGGG |
| | | AAGGATCAGGCTCCGGGTGGTATTTCGACTTCTGGGGAAGAGGC |
| | | ACCCTCGTGACTGTGTCATCTGGGGGAGGGGGTTCCGGTGGTGGC |
| | | GGATCGGGAGGAGGCGGTTCATCCTACGTGCTGACCCAGCCACCC |
| | | TCCGTGTCCGTGAGCCCCGGCCAGACTGCATCGATTACATCTTAGC |
| | | GGCGACGGCCTCTCCAAGAAATACGTGTCGTGGTACCAGCAGAA |
| | | GGCCGGACAGAGCCCGGTGGTGCTGATCTCAAGAGATAAGGAGC |
| | | GGCCTAGCGGAATCCCGGACAGGTTCTCGGGTTCCAACTCCGCGG |
| | | ACACTGCTACTCTGACCATCTCGGGGACCCAGGCTATGGACGAAG |
| | | CCGATTACTACTGCCAAGCCTGGGACGACACTACTGTCGTGTTTG |
| | | GAGGGGGCACCAAGTTGACCGTCCTTACCACTACCCCAGCACCGA |
| | | GGCCACCCACCCCGGCTCCTACCATCGCCTCCCAGCCTCTGTCCCT |
| | | GCGTCCGGAGGCATGTAGACCCGCAGCTGGTGGGGCCGTGCATA |
| | | CCCGGGGTCTTGACTTCGCCTGCGATATCTACATTTGGGCCCCTCT |
| | | GGCTGGTACTTGCGGGGTCCTGCTGCTTTCACTCGTGATCACTCTT |
| | | TACTGTAAGCGCGGTCGGAAGAAGCTGCTGTACATCTTTAAGCAA |
| | | CCCTTCATGAGGCCTGTGCAGACTACTCAAGAGGAGGACGGCTGT |
| | | TCATGCCGGTTCCCAGAGGAGGAGGAAGGCGGCTGCGAACTGCG |
| | | CGTGAAATTCAGCCGCAGCGCAGATGCTCCAGCCTACAAGCAGG |
| | | GGCAGAACCAGCTCTACAACGAACTCAATCTTGGTCGGAGAGAG |
| | | GAGTACGACGTGCTGGACAAGCGGAGAGGACGGGACCCAGAAAT |
| | | GGGCGGGAAGCCGCGCAGAAAGAATCCCCAAGAGGGCCTGTACA |
| | | ACGAGCTCCAAAAGGATAAGATGGCAGAAGCCTATAGCGAGATT |
| | | GGTATGAAAGGGGAACGCAGAAGAGGCAAAGGCCACGACGGAC |
| | | TGTACCAGGGACTCAGCACCGCCACCAAGGACACCTATGACGCTC |
| | | TTCACATGCAGGCCCTGCCGCCTCGG |

149367

| | | |
|---|---|---|
| 149367-aa | 884 | MALPVTALLLPLALLLHAARPQVQLQESGPGLVKPSQTLSLTCTVSG |
| Full CAR | | GSISSGGYYWSWIRQHPGKGLEWIGYIYYSGSTYYNPSLKSRVTISVD |
| | | TSKNQFSLKLSSVTAADTAVYYCARAGIAARLRGAFDIWGQGTMVT |
| | | VSSGGGGSGGGGSGGGGSDIVMTQSPSSVSASVGDRVIITCRASQGIR |
| | | NWLAWYQQKPGKAPNLLIYAASNLQSGVPSRFSGSGSGADFTLTISS |
| | | LQPEDVATYYCQKYNSAPFTFGPGTKVDIKTTTPAPRPPTPAPTIASQ |
| | | PLSLRPEACRPAAGGAVHTRGLDFACDIYIWAPLAGTCGVLLLSLVIT |
| | | LYCKRGRKKLLYIFKQPFMRPVQTTQEEDGCSCRFPEEEEGGCELRV |
| | | KFSRSADAPAYKQGQNQLYNELNLGRREEYDVLDKRRGRDPEMGG |
| | | KPRRKNPQEGLYNELQKDKMAEAYSEIGMKGERRRGKGHDGLYQG |
| | | LSTATKDTYDALHMQALPPR |
| 149367-nt | 906 | ATGGCCCTCCCTGTCACCGCCCTGCTGCTTCCGCTGGCTCTTCTGC |
| Full CAR | | TCCACGCCGCTCGGCCCCAAGTGCAGCTTCAGGAGAGCGGCCCG |
| | | GGACTCGTGAAGCCGTCCCAGACCCTGTCCCTGACTTGCACCGTG |
| | | TCGGGAGGAAGCATCTCGAGCGGAGGCTACTATTGGTCGTGGATT |
| | | CGGCAGCACCCTGGAAAGGGCCTGGAATGGATCGGCTACATCTA |
| | | CTACTCCGGCTCGACCTACTACAACCCATCGCTGAAGTCCAGAGT |
| | | GACAATCTCAGTGGACACGTCCAAGAATCAGTTCAGCCTGAAGCT |
| | | CTCTTCCGTGACTGCCTGCCGACACCGCCGTGTACTACTGCGCACG |
| | | CGCTGGAATTGCCGCCCGGCTGAGGGGTGCCTTCGACATTTGGGG |
| | | ACAGGGCACCATGGTCACCGTGTCCTCCGGCGGCGGAGGTTCCGG |
| | | GGGTGGAGGCTCAGGAGGAGGGGGGTCCGACATCGTCATGACTC |
| | | AGTCGCCCTCAAGCGTCAGCGCGTCCGTCGGGGACAGAGTGATC |
| | | ATCACCTGTCGGGCGTCCCAGGGAATTCGCAACTGGCTGGCCTGG |
| | | TATCAGCAGAAGCCCGGAAAGGCCCCCAACCTGTTGATCTACGCC |
| | | GCCTCAAACCTCCAATCCGGGGTGCCGAGCCGCTTCAGCGGCTCC |
| | | GGTTCGGGTGCCGATTTCACTCTGACCATCTCCTCCCTGCAACCTG |
| | | AAGATGTGGCTACCTACTACTGCCAAAAGTACAACTCCGCACCTT |
| | | TTACTTTCGGACCGGGGACCAAAGTGGACATTAAGACCACTACCC |
| | | CAGCACCGAGGCCACCCACCCCGGCTCCTACCATCGCCTCCCAGC |
| | | CTCTGTCCETGCGTCCGGAGGCATGTAGACCCGCAGCTGGTGGGG |
| | | CCGTGCATACCCGGGGTCTTGACTTCGCCTGCGATATCTACATTTG |
| | | GGCCCCTCTGGCTGGTACTTGCGGGGTCCTGCTGCTTTCACTCGTG |
| | | ATCACTCTTTACTGTAAGCGCGCTTCGGAAGAAGCTGCTGTACATC |
| | | TTTAAGCAACCCTTCATGAGGCCTGTGCAGACTACTCAAGAGGAG |
| | | GACGGCTGTTCATGCCGGTTCCCAGAGGAGGAGGAAGGCGGCTG |
| | | CGAACTGCGCGTGAAATTCAGCCGCAGCGCAGATGCTCCAGCCTA |
| | | CAAGCAGGGGCAGAACCAGCTCTACAACGAACTCAATCTTGGTC |
| | | GGAGAGAGGAGTACGACGTGCTGGACAAGCGGAGAGGACGGGA |
| | | CCCAGAAATGGGCGGGAAGCCGCGCAGAAAGAATCCCCAAGAGG |
| | | GCCTGTACAACGAGCTCCAAAAGGATAAGATGGCAGAAGCCTAT |
| | | AGCGAGATTGGTATGAAAGGGGAACGCAGAAGAGGCAAAGGCC |
| | | ACGACGGACTGTACCAGGGACTCAGCACCGCCACCAAGGACACC |
| | | TATGACGCTCTTCACATGCAGGCCCTGCCGCCTCGG |

149368

| | | |
|---|---|---|
| 149368-aa | 885 | MALPVTALLLPLALLLHAARPQVQLVQSGAEVKKPGSSVKVSCKAS |
| Full CAR | | GGTFSSYAISWVRQAPGQGLEWMGGIIPIFGTANYAQKFQGRVTITA |
| | | DESTSTAYMELSSLRSEDTAVYYCARRGGYQLLRWDVGLLRSAFDI |
| | | WGQGTMVTVSSGGGGSGGGGSGGGGSSYVLTQPPSVSVAPGQTARI |
| | | TCGGNNIGSKSVHWYQQKPGQAPVLVLYGKNNRPSGVPDRFSGSRS |
| | | GTTASLTITGAQAEDEADYYCSSRDSSGDHLRVFGTGTKVTVLTTTP |
| | | APRPRTPAPTIASQPLSLRPEACRPAAGGAVHTRGLDFACDIYIWAPL |
| | | AGTCGVLLLSLVITLYCKRGRKKLLYIFKQPFMRPVQTTQEEDGCSC |
| | | RFPEEEEGGCELRVKFSRSADAPAYKQGQNQLYNELNLGRREEYDV |
| | | LDKRRGRDPEMGGKPRRKNPQEGLYNELQKDKMAEAYSEIGMKGE |
| | | RRRGKGHDGLYQGLSTATKDTYDALHMQALPPR |
| 149368-nt | 907 | ATGGCCCTCCCTGTCACCGCCCTGCTGCTTCCGCTGGCTCTTCTGC |
| Full CAR | | TCCACGCCGCTCGGCCCCAAGTGCAGCTGGTCCAGTCGGGCGCCG |
| | | AGGTCAAGAAGCCCGGGAGCTCTGTGAAAGTGTCCTGCAAGGCC |
| | | TCCGGGGGCACCTTTAGCTCCTACGCCATCTCCTGGGTCCGCCAA |
| | | GCACCGGGTCAAGGCCTGGAGTGGATGGGGGGAATTATCCCTAT |
| | | CTTCGGCACTGCCAACTACGCCCAGAAGTTCCAGGGACGCGTGAC |
| | | CATTACCGCGGACGAATCCACCTCCACCGCTTATATGGAGCTGTC |
| | | CAGCTTGCGCTCGGAAGATACCGCCGTGTACTACTGCGCCCGGAG |
| | | GGGTGGATACCAGCTGCTGAGATGGGACGTGGGCCTCCTGCGGTC |
| | | GGCGTTCGACATCTGGGGCCAGGGCACTATGGTCACTGTGTCCAG |
| | | CGGAGGAGGCGGATCGGGAGGCGGCGGATCAGGGGGAGGCGGT |
| | | TCCAGCTACGTGCTTACTCAACCCCCTTCGGTGTCCGTGGCCCCG |
| | | GGACAGACCGCCAGAATCACTTGCGGAGGAAACAACATTGGGTC |
| | | CAAGAGCGTGCATTGGTACCAGCAGAAGCCAGGACAGGCCCCTG |
| | | TGCTGGTGCTCTACGGGAAGAACAATCGGCCCAGCGGAGTGCCG |
| | | GACAGGTTCTCGGGTTTCACGCTCCGGTACAACCGCTTCACTGACT |
| | | ATCACCGGGGCCCAGGCAGAGGATGAAGCGGACTACTACTGTTC |
| | | CTCCCGGGATTCATCCGGCGACCACCTCCGGGTGTTCGGAACCGG |
| | | AACGAAGGTCACCGTGCTGACCACTACCCCAGCACCGAGGCCAC |
| | | CCACCCCGGCTCCTACCATCGCCTCCCAGCCTCTGTCCCTGCGTCC |
| | | GGAGGCATGTAGACCCGCAGCTGGTGGGGCCGTGCATACCCGGG |
| | | GTCTTGACTTCGCCTGCGATATCTACATTTGGGCCCCTCTGGCTGG |
| | | TACTTGCGGGGTCCTGCTGCTTTCACTCGTGATCACTCTTTACTGT |
| | | AAGCGCGGTCGGAAGAAGCTGCTGTACATCTTTAAGCAACCCTTC |
| | | ATGAGGCCTGTGCAGACTACTCAAGAGGAGGACGGCTGTTCATG |
| | | CCGGTTCCCAGAGGAGGAGGAAGGCGGCTGCGAACTGCGCGTGA |
| | | AATTCAGCCGCAGCGCAGATGCTCCAGCCTACAAGCAGGGGCAG |
| | | AACCAGCTCTACAACGAACTCAATCTTGGTCGGAGAGAGGAGTA |
| | | CGACGTGCTGGACAAGCGGAGAGGACCTGGACCCAGAAATGGGCG |
| | | GGAAGCCGCGCAGAAAGAATCCCCAAGAGGGCCTGTACAACGAG |
| | | CTCCAAAAGGATAAGATGGCAGAAGCCTATAGCGAGATTGGTAT |
| | | GAAAGGGGAACGCAGAAGAGGCAAAGGCCACGACGGACTGTAC |
| | | CAGGGACTCAGCACCGCCACCAAGGACACCTATGACGCTCTTCAC |
| | | ATGCAGGCCCTGCCGCCTCGG |

149369

| | | |
|---|---|---|
| 149369-aa | 886 | MALPVTALLLPLALLLHAARPEVQLQQSSGPGLVKPSQTLSLTCAISG |
| Full CAR | | DSVSSNSAAWNWIRQSPSRGLEWLGRTYYRSKWYSFYAISLKSRIIIN |
| | | PDTSKNQRSLQLKSVTPEDTAVYYCARSSPEGLFLYWFDPWGQGTL |
| | | VTVSSGGDGSGGGGSGGGGSSSELTQDPAVSVALGQTIRITCQGDSL |
| | | GNYYATWYQQKPGQAPVLVIYGTNNRPSGIPDRFSASSSGNTASLTI |
| | | TGAQAEDEADYYCNSRDSSGHHLLFGTGTKVTVLTTTPAPRPPTPAP |
| | | TIASQPLSLRPEACRPAAGGAVHTRGLDFACDIYIWAPLATCGVLL |
| | | LSLVITLYCKRGRKKLLYIFKQPFMRPVQTTQEEDGCSCRFPEEEEGG |
| | | CELRVKFSRSADAPAYKQGQNQLYNELNLGRREEYDVLDKRRGRD |
| | | PEMGGKPRRKNPQEGLYNELQKDKMAEAYSEIGMKGERRRGKGHD |
| | | GLYQGLSTATKDTYDALHMQALPPR |
| 149369-nt | 908 | ATGGCCCTCCCTGTCACCGCCCTGCTGCTTCCGCTGGCTCTTCTGC |
| Full CAR | | TCCACCTCCCTCTCGGCCCGAAGTGCAGCTCCAACAGTCAGGACCG |
| | | GGGCTCGTGAAGCCATCCCAGACCCTGTCCCTGACTTGTGCCATC |
| | | TCGGGAGATAGCGTGTCATCGAACTCCGCCGCCTGGAACTGGATT |
| | | CGGCAGAGCCCGTCCCGCGGACTGGAGTGGCTTGGAAGGACCTA |
| | | CTACCGGTCCAAGTGGTACTCTTTCTACGCGATCTCGCTGAAGTC |
| | | CCGCATTATCATTAACCCTGATACCTCCAAGAATCAGTTCTCCCTC |
| | | CAACTGAAATCCGTCACCCCCGAGGACACAGCAGTGTATTACTGC |
| | | GCACGGAGCAGCCCCGAAGGACTGTTCCTGTATTGGTTTGACCCC |
| | | TGGGGCCAGGGGACTCTTGTGACCGTGTCGAGCGGCGGAGATGG |
| | | GTCCGGTGGCGGTGGTTCGGGGGGCGGCGGATCATCATCCGAACT |
| | | GACCCAGGACCCGGCTGTGTCCGTGGCGCTGGGACAAACCATCC |
| | | GCATTACGTGCCAGGGAGACTCCCTGGGCAACTACTACGCCACTT |
| | | GGTACCAGCAGAAGCCGGGCCAAGCCCCTGTGTTGGTCATCTACG |
| | | GGACCAACAACAGACCTTCCGGCATCCCCGACCGGTTCAGCGCTT |
| | | CGTCCTCCGGCAACACTGCCAGCCTGACCATCACTGGAGCGCAGG |
| | | CCGAAGATGAGGCCGACTACTACTGCAACAGCAGAGACTCCTCG |
| | | GGTCATCACCTCTTGTTCGGAACTGGAACCAAGGTCACCGTGCTG |
| | | ACCACTACCCCAGCACCGAGGCCACCCACCCCGGCTCCTACCATC |
| | | GCCTCCCAGCCTCTGTCCCTGCGTCCGGAGGCATGTAGACCCGCA |
| | | GCTGGTGGGGCCGTGCATACCCGGGGTCTTGACTTCGCCTGCGAT |
| | | ATCTACATTTGGGCCCCTCTGGCTGGTACTTGCGGGGTCCTGCTGC |
| | | TTTCACTCGTGATCACTCTTTACTGTAAGCGCGGTCGGAAGAAGC |
| | | TGCTGTACATCTTTAAGCAACCCTTCATGAGGCCTGTGCAGACTA |
| | | CTCAAGAGGAGGACGGCTGTTCATGCCGGTTCCCAGAGGAGGAG |
| | | GAAGGCGGCTGCGAACTGCGCGTGAAATTCAGCCGCAGCGCAGA |
| | | TGCTCCAGCCTACAAGCAGGGGCAGAACCAGCTCTACAACGAAC |
| | | TCAATCTTGGTCGGAGAGAGGAGTACGACGTGCTGGACAAGCGG |
| | | AGAGGACGGGACCCAGAAATGGGCGGGAAGCCGCGCAGAAAGA |
| | | ATCCCCAAGAGGGCCTGTACAACGAGCTCCAAAAGGATAAGATG |
| | | GCAGAAGCCTATAGCGAGATTGGTATGAAAGGGGAACGCAGAAG |
| | | AGGCAAAGGCCACGACGGACTGTACCAGGGACTCAGCACCGCCA |
| | | CCAAGGACACCTATGACGCTCTTCACATGCAGGCCCTGCCGCCTC |
| | | GG |

BCMA_ERB-C1978-A4

| | | |
|---|---|---|
| BCMA_EBB- | 887 | MALPVTALLLPLALLLHAARPEVQLVESGGGLVQPGGSLRLSCAAS |
| C1978-A4-aa | | GFTFSSYAMSWVRQAPGKGLEWVSAISGSGGSTYYADSVKGRFTISR |
| Full CAR | | DNSKNTLYLQMNSLRAEDTAVYYCAKVEGSGSLDYWGQGTLVTVS |
| | | SGGGGSGGGGSGGGGSEIVMTQSPGTLSLSPGERATLSCRASQSVSS |
| | | AYLAWYQQKPGQPPRLLISGASTRATGIPDRFGGSGSGTDFTLTISRL |
| | | EPEDFAVYYCQHYGSSFNGSSLFTFGQGTRLEIKTTTPAPRPPTPAPTI |
| | | ASQPLSLRPEACRPAAGGAVHTRGLDFACDIYIWAPLAGTCGVLLLS |
| | | LVITLYCKRGRKKLLYIFKQPFMRPVQTTQEEDGCSCRFPEEEEGGCE |
| | | LRVKFSRSADAPAYKQGQNQLYNELNLGRREEYDVLDKRRGRDPE |
| | | MGGKPRRKNPQEGLYNELQKDKMAEAYSEIGMKGERRRGKGHDG |
| | | LYQGLSTATKDTYDALHMQALPPR |
| BCMA_EBB- | 909 | ATGGCCCTCCCTGTCACCGCCCTGCTGCTTCCGCTGGCTCTTCTGC |
| C1978-A4-nt | | TCCACGCCGCTCGGCCCGAAGTGCAGCTCGTGGAGTCAGGAGGC |
| Full CAR | | GGCCTGGTCCAGCCGGGAGGGTCCCTTAGACTGTCATGCGCCGCA |
| | | AGCGGATTCACTTTCTCCTCCTATGCCATGAGCTGGGTCCGCCAA |
| | | GCCCCCGGAAAGGGACTGGAATGGGTCTFCCGCCATCTCGGGGTCT |
| | | GGAGGCTCAACTTACTACGCTGACTCCGTGAAGGGACGGTTCACC |
| | | ATTAGCCGCGACAACTCCAAGAACACCCTCTACCTCCAAATGAAC |
| | | TCCCTGCGGGCCGAGGATACCGCCGTCTACTACTGCGCCAAAGTG |
| | | GAAGGTTCAGGATCGCTGGACTACTGGGGACAGGGTACTCTCGTG |
| | | ACCGTGTCATCGGGCGGAGGAGGTTCCGGCGGTGGCGGCTCCGG |
| | | CGGCGGAGGGTCGGAGATCGTGATGACCCAGAGCCCTGGTACTC |
| | | TGAGCCTTTCGCCGGGAGAAAGGGCCACCCTGTCCTGCCGCGCTT |
| | | CCCAATCCGTGTCCTCCGCGTACTTGGCGTGGTACCAGCAGAAGC |
| | | CGGGACAGCCCCCTCGGCTGCTGATCAGCGGGGCCAGCACCCGG |
| | | GCAACCGGAATCCCAGACAGATTCGGGGGTTCCGGCAGCGGCAC |
| | | AGATTTCACCCTGACTATTTCGAGGTTGGAGCCCGAGGACTTTGC |
| | | GGTGTATTACTGTCAGCACTACGGGTCGTCCTTTAATGGCTCCAG |
| | | CCTGTTCACGTTCGGACAGGGGACCCGCCTGGAAATCAAGACCAC |
| | | TACCCCAGCACCGAGGCCACCCACCCCGGCTCCTACCATCGCCTC |
| | | CCAGCCTCTGTCCCTGCGTCCGGAGGCATGTAGACCCGCAGCTGG |
| | | TGGGGCCGTGCATACCCGGGGTCTTGACTTCGCCTGCGATATCTA |
| | | CATTTGGGCCCCTCTGGCTGGTACTTGCGGGGTCCTGCTGCTTTCA |
| | | CTCGTGATCACTCTTTACTGTAAGCGCGGTCGGAAGAAGCTGCTG |
| | | TACATCTTTAAGCAACCCTTCATGAGGCCTGTGCAGACTACTCAA |
| | | GAGGAGGACGGCTGTTCATGCCGGTTCCCAGAGGAGGAGGAAGG |
| | | CGGCTGCGAACTGCGCGTGAAATTCAGCCGCAGCGCAGATGCTCC |
| | | AGCCTACAAGCAGGGGCAGAACCAGCTCTACAACGAACTCAATC |
| | | TTGGTCGGAGAGAGGAGTACGACGTGCTGGACAAGCGGAGAGGA |
| | | CGGGACCCAGAAATGGGCGGGAAGCCGCGCAGAAAGAATCCCCA |
| | | AGAGGGCCTGTACAACGAGCTCCAAAAGGATAAGATGGCAGAAG |
| | | CCTATAGCGAGATTGGTATGAAAGGGGAACGCAGAAGAGGCAAA |
| | | GGCCACGACGGACTGTACCAGGGACTCAGCACCGCCACCAAGGA |
| | | CACCTATGACGCTCTTCACATGCAGGCCCTGCCGCCTCGG |

BCMA_EBB-C1978-G1

| | | |
|---|---|---|
| BCMA_EBB- | 888 | MALPVTALLLPLALLLHAARPEVQLVETGGGLVQPGGSLRLSCAAS |
| C1978-G1-aa | | GITFSRYPMSWVRQAPGKGLEWVSGISDSGVSTYYADSAKGRFTISR |
| Full CAR | | DNSKNTLFLQMSSLRDEDTAVYYCVTRAGSEASDIWGQGTMVTVSS |
| | | GGGGSGGGGSGGGGSEIVLTQSPATLSLSPGERATLSCRASQSVSNSL |
| | | AWYQQKPCQAPRLIAYDASSRATGIPDRFSGSGSGTDFTLTISRLEPE |
| | | DFAIYYCQQFGTSSGLTFGGGTKLEIKTTTPAPRPPTPAPTIASQPLSL |
| | | RPEACRPAAGGAVHTRGLDFACDIYIWAPLAGTCGVLLLSLVITLYC |
| | | KRGRKKLLYIFKQPFMRPVQTTQEEDGCSCRFPEEEEGGCELRVKFS |
| | | RSADAPAYKQGQNQLYNELNLGRREEYDVLDKRRGRDPEMGGKPR |
| | | RKNPQEGLYNELQKDKMAEAYSEIGMKGERRRGKGHDGLYQGLST |
| | | ATKDTYDALHMQALPPR |
| BCMA_EBB- | 910 | ATGGCCCTCCCTGTCACCGCCCTGCTGCTTCCGCTGGCTCTTCTGC |
| C1978-G1-nt | | TCCACGCCGCTCGGCCCGAAGTGCAACTGGTGGAAACCGGTGGC |
| Full CAR | | GGCCTGGTGCAGCCTGGAGGATCATTGAGGCTGTCATGCGCGGCC |
| | | AGCGGTATTACCTTCTCCCGGTACCCCATGTCCTGGGTCAGACAG |
| | | GCCCCGGGGAAAGGGCTTGAATGGGTGTCCGGGATCTCGGACTC |
| | | CGGTGTCAGCACTTACTACGCCGACTCCGCCAAGGGACGCTTCAC |
| | | CATTTCCCGGGACAACTCGAAGAACACCCTGTTCCTCCAAATGAG |
| | | CTCCCTCCGGGACGAGGATACTGCAGTGTACTACTGCGTGACCCG |
| | | CGCCGGGTCCGAGGCGTCTGACATTTGGGGACAGGGCACTATGGT |
| | | CACCGTGTCCTTCCGGCGGAGGGGGCTCGGGAGGCGGTGGCAGCG |
| | | GAGGAGGAGGGTCCGAGATCGTGCTGACCCAATCCCCGGCCACC |
| | | CTCTCGCTGAGCCCTGGAGAAAGGGCAACCTTGTCCTGTCGCGCG |
| | | AGCCAGTCCGTGAGCAACTCCCTGGCCTGGTACCAGCAGAAGCCC |
| | | GGACAGGCTCCGAGACTTCTGATCTACGACGCTTCGAGCCGGGCC |
| | | ACTGGAATCCCCGACCGCTTTTCGCTGGTCCGGCTCAGGAACCGAT |
| | | TTCACCCTGACAATCTCACGGCTGGAGCCAGAGGATTTCGCCATC |
| | | TATTACTGCCAGCAGTTCGGTACTTCCTCCGGCCTGACTTTCGGAG |
| | | GCGGCACGAAGCTCGAAATCAAGACCACTACCCCAGCACCGAGG |
| | | CCACCCACCCCGGCTCCTACCATCGCCTCCCAGCCTCTGTCCCTGC |
| | | GTCCGGAGGCATGTAGACCCGCAGCTGGTGGGGCCGTGCATACC |
| | | CGGGGTCTTGACTTCGCCTGCGATATCTACATTTGGGCCCCTCTGG |
| | | CTGGTACTTGCGGGGTCCTGCTGCTTTCACTCGTGATCACTCTTTA |
| | | CTGTAAGCGCGGTCGGAAGAAGCTGCTGTACATCTTTAAGCAACC |
| | | CTTCATGAGGCCTGTGCAGACTACTCAAGAGGAGGACGGCTGTTC |
| | | ATGCCGCTTTCCCAGAGGAGGAGGAAGGCGGCTGCGAACTGCGCG |
| | | TGAAATTCAGCCGCAGCGCAGATGCTCCAGCCTACAAGCAGGGG |
| | | CAGAACCAGCTCTACAACGAACTCAATCTTGGTCGGAGAGAGGA |
| | | GTACGACGTGCTGGAGAAGCGGAGAGGACGGGACCCAGAAATGC |
| | | GCGGGAAGCCGCGCAGAAAGAATCCCCAAGAGGGCCTGTACAAC |
| | | GAGCTCCAAAAGGATAAGATGGCAGAAGCCTATAGCGAGATTGG |
| | | TATGAAAGGGGAACGCAGAAGAGGCAAAGGCCACGACGGACTGT |
| | | ACCAGGGACTCAGCACCGCCACCAAGGACACCTATGACGCTCTTC |
| | | ACATGCAGGCCCTGCCGCCTCGG |

BCMA_EBB-C1979-C1

| | | |
|---|---|---|
| BCMA_EBB- | 889 | MALPVTALLLPLALLLHAARPQVQLVESGGGLVQPGGSLRLSCAAS |
| C1979-C1-aa | | GFTFSSYAMSWVRQAPGKGLEWVSAISGSGGSTYYADSVKGRFTISR |
| Full CAR | | DNAKNSLYLQMNSLRAEDTAIYYCARATYKRELRYYYGMDVWGQ |
| | | GTMVTVSSGGGGSGGGGSGGGGSEIVMTQSPGTVSLSPGERATLSCR |
| | | ASQSVSSSFLAWYQQKPCQAPRELLIYGASSRATGIPDRFSGSGSGTDF |
| | | TLTISRLEPEDSAVYYCQQYHSSPSWTFGQGTRLEIKTTTPAPRPPTPA |
| | | PTIASQPLSLRPEACRPAAGGAVHTRGLDFACDIYIWAPLAGTCGVL |
| | | LLSLVITLYCKRGRKKLLYIFKQPFMRPVQTTQEEDGCSCRFPEEEEG |
| | | GCELRVKFSRSADAPAYKQGQNQLYNELNLGRREEYDVLDKRRGR |
| | | DPEMGGKPRRKNPQEGLYNELQKDKMAEAYSEIGMKGERRRGKGH |
| | | DGLVQGLSTATKDTYDALHMQALPPR |
| BCMA_EBB- | 911 | ATGGCCCTCCCTCTTCACCGCCCTGCTGCTTCCGCTGGCTCTTCTGC |
| C1979-C1-nt | | TCCACGCCGCTCGGCCCCAAGTGCAGCTCGTGGAATCGGGTGGCG |
| Full CAR | | GACTGGTGCAGCCGGGGGGCTCACTTAGACTGTCCTGCGCGGCCA |
| | | GCGGATTCACTTTCTCCTCCTACGCCATGTCCTGGGTCAGACAGG |
| | | CCCCTGGAAAGGGCCTGGAATGGGTGTCCGCAATCAGCGGCAGC |
| | | GGCGGCTCGACCTATTACGCGGATTCAGTGAAGGGCAGATTCACC |
| | | ATTTCCCGGGACAACGCCAAGAACTCCTTGTACCTTCAAATGAAC |
| | | TCCCTCCGCGCGGAAGATACCGCAATCTACTACTGCGCTCGGGCC |
| | | ACTTACAAGAGGGAACTGCGCTACTACTACGGGATGGACGTCTG |
| | | GGGCCAGGGAACCATGGTCACCGTGTCCAGCGGAGGAGGAGGAT |
| | | CGGGAGGAGGCGGTAGCGGGGGTGGAGGGTCGGAGATCGTGATG |
| | | ACCCAGTCCCCCGGCACTGTGTCGCTGTCCCCCGGCGAACGGGCC |
| | | ACCCTGTCATGTCGGGCCAGCCAGTCAGTGTCGTCAAGCTTCCTC |
| | | GCCTGGTACCAGCAGAAACCGGGACAAGCTCCCCGCCTGCTGATC |
| | | TACGGAGCCAGCAGCCGGGCCACCGGTATTCCTGACCGGTTCTCC |
| | | GGTTCGGGGTCCGGGACCGACTTTACTCTGACTATCTCTCGCCTC |
| | | GAGCCAGAGGACTCCGCCGTGTATTACTGCCAGCAGTACCACTCC |
| | | TCCCCGTCCTGGACGTTCGGACAGGGCACAAGGCTGGAGATTAA |
| | | GACCACTACCCCAGCACCGAGGCCACCCACCCCGGCTCCTACCAT |
| | | CGCCTCCCAGCCTCTGTCCCTGCGTCCGGAGGCATGTAGACCCGC |
| | | AGCTGGTGGGGCCGTGCATACCCGGGGTCTTGACTTCGCCTGCGA |
| | | TATCTACATTTGGGCCCCTCTGGCTGGTACTTGCGGGGTCCTGCTG |
| | | CTTTCACTCGTGATCACTCTTTACTGTAAGCGCGGTCGGAAGAAG |
| | | CTGCTGTACATCTTTAAGCAACCCTTCATGAGGCCTGTGCAGACT |
| | | ACTCAAGAGGAGGACGGCTGTTCATGCCGGTTCCCAGAGGAGGA |
| | | GGAAGGCGGCTGCGAACTGCGCGTGAAATTCAGCCGCAGCGCAG |
| | | ATGCTCCAGCCTACAAGCAGGGGCAGAACCAGCTCTACAACGAA |
| | | CTCAATCTTGGTCGGAGAGAGGAGTACGACGTGCTGGACAAGCG |
| | | GAGAGGACGGGACCCAGAAATGGGCGGGAAGCCGCGCAGAAAG |
| | | AATCCCCAAGAGGGCCTGTACAACGAGCTCCAAAAGGATAAGAT |
| | | GGCAGAAGCCTATAGCGAGATTGGTATGAAAGGGGAACGCAGAA |
| | | GAGGCAAAGGCCACGACGGACTGTACCAGGGACTCAGCACCGCC |
| | | ACCAAGGACACCTATGACGCTCTTCACATGCAGGCCCTGCCGCCT |
| | | CGG |

BCMA_EBB-C1978-C7

| | | |
|---|---|---|
| BCMA_EBB- | 890 | MALPVTALLLPLALLLHAARPEVQLVETGGGLVQPGGSLRLSCAAS |
| C1978-C7-aa | | GFTFSSYAMSWVRQAPGKGLEWVSAISGSGGSTYYADSVKGRFTISR |
| Full CAR | | DNSKNTLYLQMNTLKAEDTAVYYCARATYKRELRYYYGMDVWGQ |
| | | GTTVTVSSGGGGSGGGGSGGGGSEIVLTQSPSTLSLSPGESATLSCRA |
| | | SQSVSTTFLAWYQQKPGQAPRLLIYGSSNRATGIPDRFSGSGSGTDFT |
| | | LTIRRLEPEDFAVYYCQQYHSSPSWTFGQGTKVEIKTTTPAPRPPTPA |
| | | PTIASQPLSLRPEACRPAAGGAVHTRGLDFACDIYIWAPLAGTCGVL |
| | | LLSLVITLYCKRGRKKLLYIFKQPFMRPVQTTQEEDGCSCRFPEEEEG |
| | | GCELRVKFSRSADAPAYKQGQNQLYNELNLGRREEYDVLDKRRGR |
| | | DPEMGGKPRRKNPQEGLYNELQKDKMAEAYSEIGMKGERRRGKGH |
| | | DGLYQGLSTATKDTYDALHMQALPPR |
| BCMA_EBB- | 912 | ATGGCCCTCCCTGTCACCGCCCTGCTGCTTCCGCTGGCTCTTCTGC |
| C1978-C7-nt | | TCCACGCCGCTCGGCCCGAGGTGCAGCTTGTGGAAACCGGTGGCG |
| Full CAR | | GACTGGTGCAGCCCGGAGGAAGCCTCAGGCTGTCCTGCGCCGCGT |
| | | CCGGCTTCACCTTCTCCTCGTACGCCATGTCCTGGGTCCGCCAGGC |
| | | CCCCGGAAAGGGCCTGGAATGGGTGTCCGCCATCTCTGGAACTCG |
| | | GAGGTTCCACGTACTACGCGGACAGCGTCAAGGGAAGGTTCACA |
| | | ATCTCCCGCGATAATTCGAAGAACACTCTGTACCTTCAAATGAAC |
| | | ACCCTGAAGGCCGAGGACACTGCTGTGTACTACTGCGCACGGGCC |
| | | ACCTACAAGAGAGAGCTCCGGTACTACTACGGAATGGACGTCTG |
| | | GGGCCAGGGAACTACTGTGACCGTGTCCTCGGGAGGGGGTGGCT |
| | | CCGGGGGGGGCGGCTCCGGCGGAGGCGGTTCCGAGATTGTGCTG |
| | | ACCCAGTCACCTTCAACTCTGTCGCTGTCCCCGGGAGAGAGCGCT |
| | | ACTCTGAGCTGCCGGGCCAGCCAGTCCGTGTCCACCACCTTCCTC |
| | | GCCTGGTATCAGCAGAAGCCGGGGCAGGCACCACGGCTCTTGAT |
| | | CTACGGGTCAAGCAACAGAGCGACCGGAATTCCTGACCGCTTCTC |
| | | GGGGAGCGGTTCAGGCACCGACTTCACCCTGACTATCCGGCGCCT |
| | | GGAACCCGAAGATTTCGCCGTGTATTACTGTCAACAGTACCACTC |
| | | CTCGCCGTCCTGGACCTTTGGCCAAGGAACCAAAGTGGAAATCAA |
| | | GACCACTACCCCAGCACCGAGGCCACCCACCCCGGCTCCTACCAT |
| | | CGCCTCCCAGCCTCTGTCCCTGCGTCCGGAGGCATGTAGACCCGC |
| | | AGCTGGTGGGGCCGTGCATACCCGGGGTCTTGACTTCGCCTGCGA |
| | | TATCTACATTTGGGCCCCTCTGGCTGGTACTGCGGGGTCCTGCTG |
| | | CTTTCACTCGTGATCACTCTTTACTGTAAGCGCGGTCGGAAGAAG |
| | | CTGCTGTACATCTTTAAGCAACCCTTCATGAGGCCTGTGCAGACT |
| | | ACTCAAGAGGAGGACGGCTGTTCATGCCGGTTCCCAGAGGAGGA |
| | | GGAAGGCGGCTGCGAACTGCGCGTGAAATTCAGCCGCAGCGCAG |
| | | ATGCTCCAGCCTACAAGCAGGGGCAGAACCAGCTCTACAACGAA |
| | | CTCAATCTTGGTCGGAGAGAGGAGTACGACGTGCTGGACAAGCG |
| | | GAGAGGACGGGACCCAGAAATGGGCGGGAAGCCGCGCAGAAAG |
| | | AATCCCCAAGAGGGCCTGTACAACGAGCTCCAAAAGGATAAGAT |
| | | GGCAGAAGCCTATAGCGAGATTGGTATGAAAGGGGAACGCAGAA |
| | | GAGGCAAAGGCCACGACGGACTGTACCAGGGACTCAGCACCGCC |
| | | ACCAAGGACACCTATGACGCTCTTCACATGCAGGCCCTGCCGCCT |
| | | CGG |

BCMA_EBB-C1978-D10

| | | |
|---|---|---|
| BCMA_EBB- | 891 | MALPVTALLLPLALLLHAARPEVQLVETGGGLVQPGRSLRLSCAAS |
| C1978-D10-aa | | GFTFDDYAMHWVRQAPGKGLEWVSGISWNSGSIGYADSVKGRFTIS |
| Full CAR | | RDNAKNSLYLQMNSLRDEDTAVYYCARVGKAVPDVAWGQGTTVTV |
| | | SSGGGGSGGGGSGGGGSDIVMTQTPSSLSASVGDRYTITCRASQSISS |
| | | YLNWYQQKPGKAPKLLIYAASSLQSGYPSRFSGSGSGTDFTLTISSLQ |
| | | PEDFATYYCQQSYSTPYSFGQGTRLEIKTTTPAPRPPTPAPTIASQPLS |
| | | LRPEACRPAAGGAVHTRGLDFACDIYIWAPIAGTCGVLLLSLVITLY |
| | | CKRGRKKLLYIFKQPFMRPVQTTQEEDGCSCRFPEEEEGGCELRVKF |
| | | SRSADAPAYKQGQNQLYNELNLGRREEYDVLDKRRGRDPEMGGKP |
| | | RRKNPQEGLYNELQKDKMAEAYSEIGMKGERRRGKGHDGLYQGLS |
| | | TATKDTYDALHMQALPPR |
| BCMA_EBB- | 913 | ATGGCCCTCCCTGTCACCGCCCTGCTGCTTCCGCTGGCTCTTCTGC |
| C1978-D10-nt | | TCCACGCCGCTCGGCCCGAACTTGCAGCTCCTTGGAAACTGGAGGT |
| Full CAR | | GGACTCGTGCAGCCTGGACGGTCGCTGCGGCTGAGCTGCGCTGCA |
| | | TCCGGCTTCACCTTCGACGATTATGCCATGCACTGGGTCAGACAG |
| | | GCGCCAGGGAAGGGACTTGAGTGGGTGTCCGGTATCAGCTGGAA |
| | | TAGCGGCTCAATCGGATACGCGGACTCCGTGAAGGGAAGGTTCA |
| | | CCATTTCCCGCGACAACGCCAAGAACTCCCTGTACTTGCAAATGA |
| | | ACAGCCTCCGGGATGAGGACACTGCCGTGTACTACTGCGCCCGCG |
| | | TCGGAAAAGCTGTGCCCGACGTCTGGGGCCAGGGAACCACTGTG |
| | | ACCGTGTCCAGCGGCGGGGGTGGATCGGGCGGTGGAGGGTCCGG |
| | | TGGAGGGGGCTCAGATATTGTGATGACCCAGACCCCCTCGTCCCT |
| | | GTCCGCCTCGGTCGGCGACCGCGTGACTATCACATGTAGAGCCTC |
| | | GCAGAGCATCTCCAGCTACCTGAACTGGTATCAGCAGAAGCCGG |
| | | GGAAGGCCCCGAAGCTCCTGATCTACGCGGCATCATCACTGCAAT |
| | | CGGGAGTGCCGAGCCGGTTTTCCGGGTCCGGCTCCGGCACCGACT |
| | | TCACGCTGACCATTTCTTCCCTGCAACCCGAGGACTTCGCCACTTA |
| | | CTACTGCCAGCAGTCCTACTCCACCCCTTACTCCTTCGGCCAAGG |
| | | AACCAGGCTGGAAATCAAGACCACTACCCCAGCACCGAGGCCAC |
| | | CCACCCCGGCTCCTACCATCGCCTCCCAGCCTCTGTCCCTGCGTCC |
| | | GGAGGCATGTAGACCCGCAGCTGGTGGGGCCGTGCATACCCGGG |
| | | GTCTTGACTTCGCCTGCGATATCTACATTTGGGCCCCTCTGGCTGG |
| | | TACTTGCGGGGTCCTGCTGCTTTCACTCGTGATCACTCTTTACTGT |
| | | AAGCGCGGTCGGAAGAAGCTGCTGTACATCTTTAAGCAACCCTTC |
| | | ATGAGGCCTGTGCAGACTACTCAAGAGGAGGACGGCTGTTCATG |
| | | CCGGTTCCCAGAGGAGGAGGAAGGCGCCTGCGAACTGCGCGTGA |
| | | AATTCAGCCGCAGCGCAGATGCTCCAGCCTACAAGCAGGGGCAG |
| | | AACCAGCTCTACAACGAACTCAATCTTGGTCGGAGAGAGGAGTA |
| | | CGACGTGCTGGACAAGCGGAGAGGACGGGACCCAGAAATGGGCG |
| | | GGAAGCCGCGCAGAAAGAATCCCCAAGAGGGCCTGTACAACGAG |
| | | CTCCAAAAGGATAAGATGGCAGAAGCCTATAGCGAGATFGGTAT |
| | | GAAAGGGGAACGCAGAAGAGGCAAAGGCCACGACGGACTGTAC |
| | | CAGGGACTCAGCACCGCCACCAAGGACACCTATGACGCTCTTCAC |
| | | ATGCAGGCCCTGCCGCCTCGG |

BCMA_EBB-C1979-C12

| | | |
|---|---|---|
| BCMA_EBB- | 892 | MALPVTALLLPLALLLHAARPEVQLVESGGGLVQPGRSLRLSCLTASG |
| C1979-C12-aa | | FTDDYAMHWVRQRPGKGLEWVASINWKGNSLAYGDSVKGRFAIS |
| Full CAR | | RDNAKNTVFLQMNSLRTEDTAVYYCASHQGVAYYNYAMDVWGR |
| | | GTLVTVSSGGGGSGGGGSGGGGSEIVLTQSPGTLSLSPGERATLSCR |
| | | ATQSIGSSFLAWYQQRPGQAPRLLIYGASQRATGIPDRFSGRGSGTDF |
| | | TLTISRVEPEDSAVYYCQHYESSPSWTFGQGTKVEIKTTTPAPRPPTP |
| | | APTIASQPLSLRPEACRPAAGGAVHTRGLDFACDIYIWAPLAGTCGV |
| | | LLLSLVITLYCKRCTRKKLLYIFKQPFMRPVQTTQEEDGCSCRFPEEEE |
| | | GGCELRVKFSRSADAPAYKQGQNQLYNELNLGRREEYDVLDKRRG |
| | | RDPEMGGKPRRKNPQEGLYNELQKDKMAEAYSEIGMKGERRRGKG |
| | | HDGLYQGLSTATKDTYDALHMQALPPR |
| BCMA_EBB- | 914 | ATGGCCCTCCCTGTCACCGCCCTGCTGCTTCCGCTGGCTCTTCTGC |
| C1979-C12-nt | | TCCACGCCGCTCGGCCCGAAGTGCAGCTCGTGGAGAGCGGGGGA |
| Full CAR | | GGATTGGTGCAGCCCGGAAGGTCCCTGCGGCTCTCCTGCACTGCG |
| | | TCTGGCTTCACCTTCGACGACTACGCGATGCACTGGGTCAGACAG |
| | | CGCCCGGGAAAGGGCCTGGAATGGGTCGCCTCAATCAACTGGAA |
| | | GGGAAACTCCCTGGCCTATGGCGACAGCGTGAAGGGCCGCTTCG |
| | | CCATTTCGCGCGACAACGCCAAGAACACCGTGTTTCTGCAAATGA |
| | | ATTCCCTGCGGACCGAGGATACCGCTGTGTACTACTGCGCCAGCC |
| | | ACCAGGGCGTGGCATACTATAACTACGCCATGGACGTGTGGGGA |
| | | AGAGGGACGCTCGTCACCGTGTCCTCCGGGGGCGGTGGATCGGG |
| | | TGGAGGAGGAAGCGGTGGCGGGGGCAGCGAAATCGTGCTGACTC |
| | | AGAGCCCGGGAACTCTTTCACTGTCCCCGGGAGAACGGGCCACTC |
| | | TCTCGTGCCGGGCCACCCAGTCCATCGGCTCCTCCTTCCTTGCCTG |
| | | GTACCAGCAGAGGCCAGGACAGGCGCCCCGCCTGCTGATCTACG |
| | | GTGCTTCCCAACGCGCCACTGGCATTCCTGACCGGTTCAGCGGCA |
| | | GAGGGTCGGGAACCGATTTCACACTGACCATTTCCCGGGTGGAGC |
| | | CCGAAGATTCGGCAGTCTACTACTGTCAGCATTACGAGTCCTCCC |
| | | CTTCATGGACCTTCGGTCAAGGGACCAAAGTGGAGATCAAGACC |
| | | ACTACCCCAGCACCGAGGCCACCCACCCCGGCTCCTACCATCGCC |
| | | TCCCAGCCTCTGTCCCTGCGTCCGGAGGCATGTAGACCCGCAGCT |
| | | GGTGGGGCCGTGCATACCCGGGGTCTTGACTTCGCCTGCGATATC |
| | | TACATTTGGGCCCCTCTGGCTGGTACTTGCGGGGTCCTGCTGCTTT |
| | | CACTCGTGATCACTCTTTACTGTAAGCGCGGTCGGAAGAAGCTGC |
| | | TGTACATCTTTAAGCAACCCTTCATGAGGCCTGTGCAGACTACTC |
| | | AAGAGGAGGACGGCTGTTCATGCCGGTTCCCAGAGGAGGAGGAA |
| | | GGCGGCTGCGAACTGCGCGTGAAATTCAGCCGCAGCGCAGATGC |
| | | TCCAGCCTACAAGCAGGGGCAGAACCAGCTCTACAACGAACTCA |
| | | ATCTTGGTCGGAGAGAGGAGTACGACGTGCTGGACAAGCGGAGA |
| | | GGACGGGACCCAGAAATGGGCGGGAAGCCGCGCAGAAAGAATC |
| | | CCCAAGAGGGCCTGTACAACGAGCTCCAAAAGGATAAGATGGCA |
| | | GAAGCCTATAGCGAGATTGGTATGAAAGGGGAACGCAGAAGAGG |
| | | CAAAGGCCACGACGGACTGTACCAGGGACTCAGCACCGCCACCA |
| | | AGGACACCTATGACGCTCTTCACATGCAGGCCCTGCCGCCTCGG |

BCMA_EBB-C1980-G4

| | | |
|---|---|---|
| BCMA_EBB- | 893 | MALPVTALLLPLALLLHAARPEVQVESGGGLVQPGGSTLRLSCAAS |
| C1980-G4-aa | | GFTFSSYAMSWVRQAPGKGLEWVSAISGSGGSTYYADSVKGRFTISR |
| Full CAR | | DNSKNTLYLQMNSLRAEDTAVYYCAKVVRDGMDVWGQGTTVTVS |
| | | SGGGGSGGGGSCTGGGSEIVLTQSPATLSLSPGERATLSCRASQSVSSS |
| | | YLAWYQQKPGQAPRLLIYGASSRATGIPDRFSGNGSGTDFTLTISRLE |
| | | PEDFAVYYCQQYGSPPRFTFGPGTKVDIKTTTPAPRPPTTPAPTIASQPL |
| | | SLRPEACRPAAGGAVHTRGLDFACDIYIWAPLAGTCGVLLLSLVITL |
| | | YCKRGRKKLLYIFKQPFMRPVQTTQEEDGCSCRFPEEEEGGCELRVK |
| | | FSRSADAPAYKQGQNQLYNELNLGRREEYDVLDKRRGRDPEMGGK |
| | | PRRKNPQEGLYNELQKDKMAEAYSEIGMKGERRRGKGHDGLYQGL |
| | | STATKDTYDALHMQALPPR |
| BCMA_EBB- | 915 | ATGGCCCTCCCTGTCACCGCCCTGCTGCTTCCGCTGGCTCTTCTGC |
| C1980-G4-nt | | TCCACGCCGCTCGGCCCGAGGTGCAGTTGGTCGAAAGCGGGGGC |
| Full CAR | | GGGCTTGTGCAGCCTGGCGGATCACTGCGGCTGTCCTGCGCGGCA |
| | | TCAGGCTTCACGTTTTCTTCCTACGCCATGTCCTGGGTGCGCCAGG |
| | | CCCCTGGAAAGGGACTGGAATGGGTGTCCGCGATTTCGGGGTCCG |
| | | GCGGGAGCACCTACTACGCCGATTCCGTGAAGGGCCGCTTCACTA |
| | | TCTCGCGGGACAACTCCAAGAACACCCTCTACCTCCAAATGAATA |
| | | GCCTGCGGGCCGAGGATACCGCCGTCTACTATTGCGCTAAGGTCG |
| | | TGCGCGACGGAATGGACGTGTGGGGACAGGGTACCACCGTGACA |
| | | GTGTCCTCGGGGGGAGGCGGTAGCGGCGGAGGAGGAAGCGGTGG |
| | | TGGAGGTTCCGAGATTGTGCTGACTCAATCACCCGCGACCCTGAG |
| | | CCTGTCCCCCGGCGAAAGGGCCACTCTGTCCTGTCGGGCCAGCCA |
| | | ATCAGTCTCCTCCTCGTACCTGGCCTGGTACCAGCAGAAGCCAGG |
| | | ACAGGCTCCGAGACTCCTTATCTATGGCGCATCCTCCCGCGCCAC |
| | | CGGAATCCCGGATAGGTTCTCGGGAAACGGATCGGGGACCGACT |
| | | TCACTCTCACCATCTCCCGGCTGGAACCGGAGGACTTCGCCGTGT |
| | | ACTACTGCCAGCAGTACGGCAGCCCGCCTAGATTCACTTTCGGCC |
| | | CCGGCACCAAAGTGGACATCAAGACCACTACCCCAGCACCGAGG |
| | | CCACCCACCCCGGCTCCTACCATCGCCTCCCAGCCTCTGTCCCTGC |
| | | GTCCGGAGGCATGTAGACCCGCAGCTGGTGGGGCCGTGCATACC |
| | | CGGGGTCTTGACTTCGCCTGCGATATCTACATTTGGGCCCCTCTGG |
| | | CTGGTACTTGCGGGGTCCTGCTGCTTTCACTCGTGATCACTCTTTA |
| | | CTGTAAGCGCGGTCGGAAGAACTCTGCTGTACATCTTTAAGCAACC |
| | | CTTCATGAGGCCTGTGCAGACTACTCAAGAGGAGGACGGCTGTTC |
| | | ATGCCGGTTCCCAGAGGAGGAGGAAGGCGGCTGCGAACTGCGCG |
| | | TGAAATTCAGCCGCAGCGCAGATGCTCCAGCCTACAAGCAGGGG |
| | | CAGAACCACCTCTACAACGAACTCAATCTTGGTCGGAGAGAGGA |
| | | GTACGACGTGCTGGACAAGCGGAGAGGACGGGACCCAGAAATGG |
| | | GCGGGAAGCCGCGCAGAAAGAATCCCCAAGAGGGCCTGTACAAC |
| | | GAGCTCCAAAAGGATAAGATGGCAGAAGCCTATAGCGAGATTGG |
| | | TATGAAAGGGGAACGCAGAAGAGGCAAAGGCCACGACGGACTGT |
| | | ACCAGGGACTCAGCACCGCCACCAAGGACACCTATGACGCTCTTC |
| | | ACATGCAGGCCCTGCCGCCTCGG |

BCMA_EBB-C1980-D2

| | | |
|---|---|---|
| BCMA_EBB- | 894 | MALPVTALLLPLALLLHAARPEVQLLESGGGLVQPGGSLRLSCAASG |
| C1980-D2-aa | | FTFSSYAMSWVRQAPGKGLEWVSAISGSGGSTYYADSVKGRFTISRD |
| Full CAR | | NSKNTLYLQMNSLRAEDTAVYYCAKIPQTGTFDYWGQGTLVTVSSG |
| | | GGGSGGGGSGGGGSEIVLTQSPGTLSLSPGERATLSCRASQSVSSSYL |
| | | AWYQQRPGQAPRLLIYGASSRATGIPDRFSGSGSGTDFTLTISRLEPE |
| | | DFAVYYCQHYGSSPSWTFGQGTRLEIKTTTPAPRPPTPAPTIASQPLS |
| | | LRPEACRPAAGGAVHTRGLDFACDIYIWAPLAGTCGVLLLSLVITLY |
| | | CKRGRKKLLYIFKQPFMRPVQTTQEEDGCSCRFPEEEEGGCELRVAKF |
| | | SRSADAPAYKQGQNQLYNELNLGRREEYDVLDKRRGRDPEMGGKP |
| | | RRKNPQEGLYNELQKDKMAEAYSEIGMKGERRRGKGHDGLYQGLS |
| | | TATKDTYDALHMQALPPR |
| BCMA_EBB- | 916 | ATGGCCCTCCCTGTCACCGCCCTGCTGCTTCCGCTGGCTCTTCTGC |
| C1980-D2-nt | | TCCACGCCGCTCGGCCCGAAGTGCAGCTGCTGGAGTCCGGCGGTG |
| Full CAR | | GATTGGTGCAACCGGGGGGATCGCTCAGACTGTCCTGTGCGGCGT |
| | | CAGGCTTCACCTTCTCGAGCTACGCCATGTCATGGGTCAGACAGG |
| | | CCCCTGGAAAGGGTCTGGAATGGGTGTCCGCCATTTCCGGGAGCG |
| | | GGGGATCTACATACTACGCCGATAGCGTGAAGGGCCGCTTCACCA |
| | | TTTCCCGGGACAACTCCAAGAACACTCTCTATCTGCAAATGAACT |
| | | CCCTCCGCGCTGAGGACACTGCCGTGTACTACTGCGCCAAAATCC |
| | | CTCAGACCGGCACCTTCGACTACTGGGGACAGGGGACTCTGGTCA |
| | | CCGTCAGCAGCGGTGGCGGAGGTTCGGGGGGAGGAGGAAGCGGC |
| | | GGCGGAGGGTCCGAGATTGTGCTGACCCAGTCACCCGGCACTTTG |
| | | TCCCTGTCGCCTGGAGAAAGGGCCACCCTTTCCTGCCGGGCATCC |
| | | CAATCCGTGTCCTCCTCGTACCTGGCCTGGTACCAGCAGAGGCCC |
| | | GGACAGGCCCCACGGCTTCTGATCTACGGAGCAAGCAGCCGCGC |
| | | GACCGGTATCCCGGACCGGTTTTCGGGCTCGGGCTCAGGAACTGA |
| | | CTTCACCCTCACCATCTCCCGCCTGGAACCCGAAGATTTCGCTGT |
| | | GTATTACTGCCAGCACTACGGCAGCTCCCCGTCCTGGACGTTCGG |
| | | CCAGGGAACTCGGCTGGAGATCAAGACCACTACCCCAGCACCGA |
| | | GGCCACCCACCCCGGCTCCTACCATCGCCTCCCAGCCTCTGTCCCT |
| | | GCGTCCGGAGGCATGTAGACCCGCAGCTGGTGGGGCCGTGCATA |
| | | CCCGGGGTCTTGACTTCGCCTGCGATATCTACATTTGGGCCCCTCT |
| | | GGCTGGTACTTGCGGGGTCCTGCTGCTTTCACTCGTGATCACTCTT |
| | | TACTGTAAGCGCGGTCGGAAGAAGCTGCTGTACATCTTTAAGCAA |
| | | CCCTTCATGAGGCCTGTGCAGACTACTCAAGAGGAGGACGGCTGT |
| | | TCATGCCGGTTCCCAGAGGAGGAGGAAGGCGGCTGCGAACTGCG |
| | | CGTGAAATTCAGCCGCAGCGCAGATGCTCCAGCCTACAAGCAGG |
| | | GGCAGAACCAGCTCTACAACGAACTCAATCTTGGTCGGAGAGAG |
| | | GAGTACGACGTGCTGGACAAGCGGAGAGGACGGGACCCAGAAAT |
| | | GGGCGGGAAGCCGCCTCAGAAAGAATCCCCAAGAGGGCCTGTACA |
| | | ACGAGCTCCAAAAGGATAAGATGGCAGAAGCCTATAGCGAGATT |
| | | GGTATGAAAGGGGAACGCAGAAGAGGCAAAGGCCACGACGGAC |
| | | TGTACCAGGGACTCAGCACCGCCACCAAGGACACCTATGACGCTC |
| | | TTCACATGCAGGCCCTGCCGCCTCGG |

BCMA_EBB-C1978-A10

| | | |
|---|---|---|
| BCMA_EBB- | 895 | MALPVTALLLPLALLLHAARPEVQLVETGGGLVQPGGSLRLSCAAS |
| C1978-A10-aa | | GFTFSSYAMSWVRQAPGKGLEWVSAISGSGGSTYYADSVKGRFTMS |
| Full CAR | | RENDKNSVFLQMNSLRVEDTGVYYCARANYKRELRYYYGMDVWG |
| | | QGTMVTVSSGGGGSGGGGSGGGGSEIVMTQSPGTLSLSPGESATLSC |
| | | RASQRVASNYLAWYQHKPGQAPSLLISGASSRATGVPDRFSGSGSGT |
| | | DFTLAISRLEPEDSAVYYCQHYDSSPSWTFGQGTKVEIKTTTPAPRPP |
| | | TPAPTIASQPLSLRPEACRPAAGGAVHTRGLDFACDIYIWAPLAGTCG |
| | | VLLLSLVITLYCKRGRKKLLYIFKQPFMRPVQTTQEEDGCSCRFPEEE |
| | | EGGCELRVKFSRSADAPAYKQGQNQLYNELNLGRREEYDVLDKRR |
| | | GRDPEMGGKPRRKNPQEGLYNELQKDKMAEAYSEIGMKGERRRGK |
| | | GHDGLVQGLSTATKDTYDALHMQALPPR |
| BCMA_EBB- | 917 | ATGGCCCTCCCTGTCACCGCCCTGCTGCTTCCGCTGGCTCTTCTGC |
| C1978-A10-nt | | TCCACGCCGCTCGGCCCGAAGTGCAACTGGTGGAAACCGGTGGA |
| Full CAR | | GGACTCGTGCACTCCTGGCGGCAGCCTCCGGCTGAGCTGCGCCGCT |
| | | TCGGGATTCACCTTTTCCTCCTACGCGATGTCTTGGGTCAGACAG |
| | | GCCCCCGGAAAGGGGCTGGAATGGGTGTCAGCCATCTCCGGCTCC |
| | | GGCGGATCAACGTACTACGCCGACTCCGTGAAAGGCCGGTTCACC |
| | | ATGTCGCGCGAGAATGACAAGAACTCCGTGTTCCTGCAAATGAAC |
| | | TCCCTGAGGGTGGAGGACACCGGAGTGTACTATTGTGCGCGCGCC |
| | | AACTACAAGAGAGAGCTGCGGTACTACTACGGAATGGACGTCTG |
| | | GGGACAGGGAACTATGGTGACCGTGTCATCCGGTGGAGGGGGAA |
| | | GCGGCGGTGGAGGCAGCGGGGGCGGGGGTTCAGAAATTGTCATG |
| | | ACCCAGTCCCCGGGAACTCTTTCCCTCTCCCCCGGGGAATCCGCG |
| | | ACTTTGTCCTGCCGGGCCAGCCAGCGCGTGGCCTCGAACTACCTC |
| | | GCATGGTACCAGCATAAGCCAGGCCAAGCCCCTTCCCTGCTGATT |
| | | TCCGGGGCTAGCAGCCGCGCCACTGGCGTGCCGGATAGGTTCTCG |
| | | GGAAGCGGCTCGGGTACCGATTTCACCCTGGCAATCTCGCGGCTG |
| | | GAACCGGAGGATTCGGCCGTGTACTACTGCCAGCACTATGACTCA |
| | | TCCCCCTCCTGGACATTCGGACAGGGCACCAAGGTCGAGATCAAG |
| | | ACCACTACCCCAGCACCGAGGCCACCCACCCCGGCTCCTACCATC |
| | | GCCTCCCAGCCTCTGTCCCTGCGTCCGGAGGCATGTAGACCCGCA |
| | | GCTGGTGGGGCCGTGCATACCCGGGGTCTTGACTTCGCCTGCGAT |
| | | ATCTACATTTGGGCCCCTCTGGCTGGTACTTGCGGGGTCCTGCTGC |
| | | TTTCACTCGTGATCACTCTTTACTGTAAGCGCGGTCGGAAGAAGC |
| | | TGCTGTACATCTTTAAGCAACCCTTCATGAGGCCTGTGCAGACTA |
| | | CTCAAGAGGAGGACGGCTGTTCATGCCGGTTCCCAGAGGAGGAG |
| | | GAAGGCGGCTGCGAACTGCGCGTGAAATTCAGCCGCAGCGCAGA |
| | | TGCTCCAGCCTACAAGCAGGGGCAGAACCAGCTCTACAACGAAC |
| | | TCAATCTTGGTCGGAGAGAGGAGTACGACGTGCTGGACAAGCGG |
| | | AGAGGACGGGACCCAGAAATGGGCGGGAAGCCGCGCAGAAAGA |
| | | ATCCCCAAGAGGGCCTGTACAACGAGCTCCAAAAGGATAAGATG |
| | | GCAGAAGCCTATAGCGAGATTGGTATGAAAGGGGAACGCAGAAG |
| | | AGGCAAAGGCCACGACGGACTGTACCAGGGACTCAGCACCGCCA |
| | | CCAAGGACACCTATGACGCTCTTCACATGCAGGCCCTGCCGCCTC |
| | | GG |

BCMA_EBB-C1978-D4

| | | |
|---|---|---|
| BCMA_EBB- | 896 | MALPVTALLLPLALLLHAARPEVQLLETGGGLVQPGGSLRLSCAASG |
| C1978-D4-aa | | FSFSSYAMSWVRQAPGKGLEWVSAISGSGGSTYYADSVKGRFTISRD |
| Full CAR | | NSKNTLYLQMNSLRAEDTAVYYCAKALVGATGAFDIWGQGTLVTV |
| | | SSGGGGSGGGGSGGGGSEIVLTQSPGTLSLSPGERATLSCRASQSLSS |
| | | NFLAWYQQKPGQAPGLLIYGASNWATGTPDRFSGSGSGTDFTLTITR |
| | | LEPEDFAVYYCQYYGTSPMYTFGQGTKVEIKTTTTPAPRPPTPAPTIAS |
| | | QPLSLAPEACRPAAGGAVHTRGTLDFACDIYIWAPLAGTCGVLLLSLV |
| | | ITLYCKRGRKKLLYIFKQPFMRPVQTTQEEDGCSCRFPEEEEGGCELR |
| | | VKFSRSADAPAYKQGQNQLYNELNLGRREEYDVLDKRRGRDPEMG |
| | | GKPRRKNPQEGLYNELQKDKMAEAYSEIGMKGERRRGKGHDGLYQ |
| | | GLSTATKDTYDALHMQALPPR |
| BCMA_EBB- | 918 | ATGGCCCFCCCTGTCACCGCCCTGCTGCTTCCGCTGGCTCTTCTGC |
| C1978-D4-nt | | TCCACGCCGCTCGGCCCGAAGTGCAGCTGCTCGAAACCGGTGGA |
| Full CAR | | GGGCTGGTGCAGCCAGGGGGCTCCCTGAGGCTTTCATGCGCCGCT |
| | | AGCGGATTCTCCTTCTCCTCTTACGCCATGTCGTGGGTCCGCCAAG |
| | | CCCCTGGAAAAGGCCTGGAATGGGTGTCCGCGATTTCCGGGAGC |
| | | GGAGGTTCGACCTATTACGCCGACTCCGTGAAGGGCCGCTTTACC |
| | | ATCTCCCGGGATAACTCCAAGAACACTCTCTTACCTCCAAATGAAC |
| | | TCGCTGAGAGCCGAGGACACCGCCGTGTATTACTGCGCGAAGGC |
| | | GCTGGTCGGCGCGACTGGGGCATTCGACATCTGGGGACAGGGAA |
| | | CTCTTGTGACCGTGTCGAGCGGAGGCGGCGGCTCCGGCGGAGGA |
| | | GGGAGCGGGGGCGGTGGTTCCGAAATCGTGTTGACTCAGTCCCCG |
| | | GGAACCCTGAGCTTCTTCACCCGGGGAGCGGGCCACTCTCTCCTGT |
| | | CGCGCCTCCCAATCGCTCTCATCCAATTTCCTGGCCTGGTACCAGC |
| | | AGAAGCCCGGACAGGCCCCGGGCCTGCTCATCTACGGCGCTTCAA |
| | | ACTGGGCAACGGGAACCCCTGATCGGTTCAGCGGAAGCGGATCG |
| | | GGTACTGACTTTACCCTGACCATCACCAGACTGGAACCGGAGGAC |
| | | TTCGCCGTGTACTACTGCCAGTACTACGGCACCTCCCCCATGTAC |
| | | ACATTCGGACAGGGTACCAAGGTCGAGATTAAGACCACTACCCC |
| | | AGCACCGAGGCCACCCACCCCGGCTCCTACCATCGCCTCCCAGCC |
| | | TCTGTCCCTGCGTCCGGAGGCATGTAGACCCGCAGCTGGTGGGGC |
| | | CGTGCATACCCGGGGTCTTGACTTCGCCTGCGATATCTACATTTG |
| | | GGCCCCTCTGGCTGGTACTTGCGGGGTCCTGCTGCTTTCACTCGTG |
| | | ATCACTCTTTACTGTAAGCGCGGTCGGAAGAAGCTGCTGTACATC |
| | | TTTAAGCAACCCTTCATGAGGCCTGTGCAGACTACTCAAGAGGAG |
| | | GACGGCTGTTCATGCCGGTTCCCAGAGGAGGAGGAAGGCGGCTG |
| | | CGAACTGCGCGTGAAATTCAGCCGCAGCGCAGATGCTCCAGCCTA |
| | | CAAGCAGGGGCAGAACCAGCTCTACAACGAACTCAATCTTGGTC |
| | | GGAGAGAGGAGTACGACGTGCTGGACAAGCGGAGAGGACGGGA |
| | | CCCAGAAATGGGCGGGAAGCCGCGCAGAAAGAATCCCCAAGAGG |
| | | GCCTGTACAACGAGCTCCAAAAGGATAAGATGGCAGAAGCCTAT |
| | | AGCGAGATTGGTATGAAAGGGGAACGCAGAAGAGGCAAAGGCC |
| | | ACGACGGACTGTACCAGGGACTCAGCACCGCCACCAAGGACACC |
| | | TATGACGCTCTTCACATGCAGGCCCTGCCGCCTCGG |

BCMA_EBB-C1980-A2

| | | |
|---|---|---|
| BCMA_EBB- | 897 | MALPVTALLLPLALLLHAARPEVQLLESGGGLVQPGGSLRLSCAASG |
| C1980-A2-aa | | FTFSSYAMSWVRQAPGKGLEWVSAISGSGGSTYYADSVKGRFTISRD |
| Full CAR | | NSKNTLYLQMNSLRAEDTAVYYCVLWFGEGFDPWGQGTLVTVSSG |
| | | GGGSGGGGSGGGGSDIVLTQSPLSLPVTPGEPASISCRSSQSLLHSNG |
| | | YNYLDWYLQKPGQSPQLLIYLGSNRASGVPDRFSGSGSGTDFTLKIS |
| | | RVEAEDVGVYYCMQALQTPLTFGGGTKVDIKTTTPAPRPPTPAPTIA |
| | | SQPLSLRPEACRPAAGGAVHTRGLDFACDIYIWAPLAGTCGVLLLSL |
| | | VITLYCKRGRKKLLYIFKQPRMRPVQTTQEEDGCSCRFPEEEEGGCEL |
| | | RVKFSRSADAPAYKQGQNQLYNELNLGRREEYDVLDKRRGRDPEM |
| | | GGKPRRKNPQEGLYNELQKDKMAEAYSEIGMKGERRRGKGHDGLY |
| | | QGLSTATKDTYDALHMQALPPR |
| BCMA_EBB- | 919 | ATGGCCCTCCCTGTCACCGCCCTGCTGCTTCCGCTGGCTCTTCTGC |
| C1980-A2-nt | | TCCACGCCGCTCGGCCCGAAGTGCAGCTGCTTGAGAGCGGTGGA |
| Full CAR | | GGTCTGGTGCAGCCCGGGGGATCACTGCGCCTGTCCTGTGCCGCG |
| | | TCCGGTTTCACTTTCTCCTCGTACGCCATGTCGTGGGTCAGACAGG |
| | | CACCGGGAAAGGGACTGGAATGGGTGTCAGCCATTTCGGGTTCG |
| | | GGGGGCAGCACCTACTACGCTGACTCCGTGAAGGGCCGGTTCACC |
| | | ATTTCCCGCGACAACTCCAAGAACACCTTGTACCTCCAAATGAAC |
| | | TCCCTGCGGGCCGAAGATACCGCCGTGTATTACTGCGTGCTGTGG |
| | | TTCGGAGAGGGATTCGACCCGTGGGGACAAGGAACACTCGTGAC |
| | | TGTGTCATCCGGCGGAGGCGGCAGCGGTGGCGGCGGTTCCGGCG |
| | | GCGGCGGATCTGACATCGTGTTGACCCAGTCCCCTCTGAGCCTGC |
| | | CGGTCACTCCTGGCGAACCAGCCAGCATCTCCTGCCGGTCGAGCC |
| | | AGTCCCTCCTGCACTCCAATGGGTACAACTACCTCGATTGGTATC |
| | | TGCAAAACTCCGGGCCAGAGCCCCCAGCTGCTGATCTACCTTGGGT |
| | | CAAACCGCGCTTCCGGGGTGCCTGATAGATTCTCCGGGTCCGGGA |
| | | GCGGAACCGACTTTACCCTGAAAATCTCGAGGGTGGAGGCCGAG |
| | | GACGTCGGAGTGTACTACTGCATGCAGGCGCTCCAGACTCCCCTG |
| | | ACCTTCGGAGGAGGAACGAAGGTCGACATCAAGACCACTACCCC |
| | | AGCACCGAGGCCACCCACCCCGGCTCCTACCATCGCCTCCCAGCC |
| | | TCTGTCCCTGCGTCCGGAGGCATGTAGACCCGCAGCTGGTGGGGC |
| | | CGTGCATACCCGGGGTCTTGACTTCGCCTGCGATATCTACATTTG |
| | | GGCCCCTCTGGCTGGTACTTGCGGGGTCCTGCTGCTTTCACTCGTG |
| | | ATCACTCTTTACTGTAAGCGCGGTCGGAAGAAGCTGCTGTACATC |
| | | TTTAAGCAACCCTTCATGAGGCCTGTGCAGACTACTCAAGAGGAG |
| | | GACGGCTGTTCATGCCGGTTCCCAGAGGAGGAGGAAGGCGGCTG |
| | | CGAACTGCGCGTGAAATTCAGCCGCAGCCTCAGATGCTCCAGCCTA |
| | | CAAGCAGGGGCAGAACCAGCTCTACAACGAACTCAATCTTGGTC |
| | | GGAGAGAGGAGTACGACGTGCTGGACAAGCGGAGAGGACGGGA |
| | | CCCAGAAATGGGCGGGAAGCCGCGCAGAAAGAATCCCCAAGAGG |
| | | GCCTGTACAACGAGCTCCAAAAGGATAAGATGGCAGAAGCCTAT |
| | | AGCGAGATTGGTATGAAAGGGGAACGCAGAAGAGGCAAAGGCC |
| | | ACGACGGACTGTACCAGGGACPCAGCACCGCCACCAAGGACACC |
| | | TATGACGCTCTTCACATGCAGGCCCTGCCGCCTCGG |

BCMA_EBB-C1981-C3

| | | |
|---|---|---|
| BCMA_EBB- | 898 | MALPVTALLLPLALLLHAARPQVQLVESGGGLVQPGGSLRLSCAAS |
| C1981-C3-aa | | GFTFSSYAMSWVRQAPGKGLEWVSAISGSGGSTYYADSVKGRFTISR |
| Full CAR | | DNSKNTLYLQMNSLRAEDTAVYYCAKVGYDSSGYYRDYYGMDVW |
| | | GQGTTVTVSSGGGGSGGGGSGGGGSEIVLTQSPGTLSLSPGERATLS |
| | | CRASQSVSSSYLAWYQQKPGQAPRLLIYGTSSRATGISDRFSGSGSGT |
| | | DFTLTISRLEPEDFAVYYCQHYGNSPPKFTFGPGTKLEIKTTTPAPRPP |
| | | TPAPTIASQPLSLRPEACRPAAGGAVHTRGLDFACTDIYIWAPLAGTCG |
| | | VLLLSLVITLYCKRGRKKLLYIFKQPFMRPVQTTQEEDGCSCRFPEEE |
| | | EGGCELRVKFSRSADAPAYKQGQNQLYNELNLGRREEYDVLDKRR |
| | | GRDPEMGGKPRRKNPQEGLYNELQKDKMAEAYSEIGMKGERRRGK |
| | | GHDGLYQGLSTATKDTYDALHMQALPPR |
| BCMA_EBB- | 920 | ATGGCCCTCCCTGTCACCGCCCTGCTGCTTCCGCTGGCTCTTCTGC |
| C1981-C3-nt | | TCCACGCCGCTCGGCCCCAAGTGCAGCTCGTGGAGTCAGGCGGA |
| Full CAR | | GGACTGGTGCAGCCCGGGGGCTCCCTGAGACTTTCCTGCGCGGCA |
| | | TCGGGTTTTACCTTCTCCTCCTATGCTATGTCCTGGGTGCGCCAGG |
| | | CCCCGGGAAAGGGACTGGAATGGGTGTCCGCAATCAGCGGTAGC |
| | | GGGGGCTCAACATACTACGCCGACTCCGTCAAGGGTCGCTTCACT |
| | | ATTTVCCGGGACAACTCCAAGAATACCCTGTACCTCCAAATGAAC |
| | | AGCCTCAGGGCCGAGGATACTGCCGTGTACTACTGCGCCAAAGTC |
| | | GGATACGATAGCTCCGGTTACTACCGGGACTACTACGGAATGGAC |
| | | GTGTGGGGACAGGGCACCACCGTGACCGTGTCAAGCGGCGGAGG |
| | | CGGTTTCAGGAGGGGGAGGCTCCGGCGGTGGAGGGTCCGAAATCG |
| | | TCCTGACTCAGTCGCCTGGCACTCTGTCGTTGTCCCCGGGGGAGC |
| | | GCGCTACCCTGTCGTGTCGGGCGTCGCAGTCCGTGTCGAGCTCCT |
| | | ACCTCGCGTGGTACCAGCAGAAGCCCGGACAGGCCCCTAGACTTC |
| | | TGATCTACGGCACTTCTTCACGCGCCACCGGGATCAGCGACAGGT |
| | | TCAGCGGCTCCGGCTCCGGGACCGACTTCACCCTGACCATTAGCC |
| | | GGCTGGAGCCTGAAGATTTCGCCGTGTATTACTGCCAACACTACG |
| | | GAAACTCGCCGCCAAAGTTCACGTTCGGACCCGGAACCAAGCTG |
| | | GAAATCAAGACCACTACCCCAGCACCGAGGCCACCCACCCCGGC |
| | | TCCTACCATCGCCTCCCAGCCTCTGTCCCTGCGTCCGGAGGCATGT |
| | | AGACCCGCAGCTGGTGGGGCCGTGCATACCCGGGGTCTTGACTTC |
| | | GCCTGCGATATCTACATTTGGGCCCCTCTGGCTGGTACTTGCGGG |
| | | GTCCTGCTGCTTTCACTCGTGATCACTCTTTACTGTAAGCGCGGTC |
| | | GGAAGAAGCTGCTGTACATCTTTAAGCAACCCTTCATGAGGCCTG |
| | | TGCAGACTACTCAAGAGGAGGACGGCTGTTCATGCCGGTTCCCAG |
| | | AGGAGGAGGAAGGCGGCTGCGAACTGCGCGTGAAATTCAGCCGC |
| | | AGCGCAGATGCTCCAGCCTACAAGCAGGGGCAGAACCAGCTCTA |
| | | CAACGAACTCAATCTTGGTCGGAGAGAGGAGTACGACGTGCTGG |
| | | ACAAGCGGAGAGGACGGGACCCAGAAATGGGCGGGAAGCCGCG |
| | | CAGAAAGAATCCCCAAGAGGGCCTGTACAACGAGCTCCAAAAGG |
| | | ATAAGATGGCAGAAGCCTATAGCGAGATTGGTATGAAAGGGGAA |
| | | CGCAGAAGAGGCAAAGGCCACGACGGACTGTACCAGGGACTCAG |
| | | CACCGCCACCAAGGACACCTATGACGCTCTTCACATGCAGGCCCT |
| | | GCCGCCTCGG |

BCMA_EBB-C1978-G4

| | | |
|---|---|---|
| BCMA_EBB- | 899 | MALPVTALLLPLALLLHAARPEVQLVESGGGLVQPGGSLRLSCAAS |
| C1978-G4-aa | | GFTFSSYAMSWVRQAPGKGLEWVSAISGSGGSTYYADSVKGRFTISR |
| Full CAR | | DNSKNTLYLQMNSLRAEDTAVYYCAKMGWSSGYLGAFDIWGQGT |
| | | TVTVSSGGGGSGGGGSGGGGSEIVLTQSPGTLSLSPGERATLSCRASQ |
| | | SVASSFLAWYQQKPGQAPRLLIYGASGRATGIPDRFSGSGSGTDFTLT |
| | | ISRLEPEDFAVYYCQHYGGSPRLTFGGGTKVDIKITTPAPRPPTPAPTI |
| | | ASQPLSLRPEACRPAAGGAVHTRGLDFACDIYIWAPLAGTCGVLLLS |
| | | LVITLYCKRGRKKLLYIFKQPFMRPVQTTQEEDGCSCRFPFEEEGGCE |
| | | LRVKFSRSADAPAYKQGQNQLYNELNLGRREEYDVLDKRRGRDPE |
| | | MGGKPRRKNPQEGLYNELQKDKMAEAYSEIGMKGERRRGKGHDG |
| | | LYQGLSTATKDTYDALHMQALPPR |
| BCMA_EBB- | 921 | ATGGCCCTCCCTGTCACCGCCCTGCTGCTTCCGCTGGCTCTTCTGC |
| C1978-G4-nt | | TCCACGCCGCTCGGCCCGAAGTCCAACTGGTGGAGTCCGGGGGA |
| Full CAR | | GGGCTCGTGCAGCCCGGAGGCAGCCTTCGGCTGTCGTGCGCCGCC |
| | | TCCGGGTTCACGTTCTCATCCTACGCGATGTCGTGGGTCAGACAG |
| | | GCACCAGGAAAGGGACTGGAATGGGTGTCCGCCATTAGCGGCTC |
| | | CGGCGGTAGCACCTACTATGCCGACTCAGTGAAGGGAAGGTTCA |
| | | CTATCTCCCGCGACAACAGCAAGAACACCCTGTACCTCCAAATGA |
| | | ACTCTCTGCGGGCCGAGGATACCGCGGTGTACTATTGCGCCAAGA |
| | | TGGGTTGGTCCAGCGGATACTTGGGAGCCTTCGACATTTGGGGAC |
| | | AGGGCACTACTGTGACCGTGTCCTCCGGGGGTGGCGGATCGGGA |
| | | GGCGGCGGCTCGGGTGGAGGGGGTTCCGAAATCGTGTTGACCCA |
| | | GTCACCGGGAACCCTCTCGCTGTCCCCGGGAGAACGGGCTACACT |
| | | GTCATGTAGAGCGTCCCAGTCCGTGGCTTCCTCGTTCCTGGCCTG |
| | | GTACCAGCAGAAGCCGGGACAGGCACCCCGCCTGCTCATCTACG |
| | | GAGCCAGCGGCCGGGCGACCGGCATCCCTGACCGCTTCTCCGGTT |
| | | CCGGCTCGGGCACCGACTTTACTCTGACCATTAGCAGGCTTGAGC |
| | | CCGAGGATTTTGCCGTGTACTACTGCCAACACTACGGGGGGAGCC |
| | | CTCGCCTGACCTTCGGAGGCGGAACTAAGGTCGATATCAAAACCA |
| | | CTACCCCAGCACCGAGGCCACCCACCCCGGCTCCTACCATCGCCT |
| | | CCCAGCCTCTGTCCCTGCGTCCGGAGGCATGTAGACCCGCAGCTG |
| | | GTGGGGCCGTGCATACCCGGGGTCTTGACTTCGCCTGCGATATCT |
| | | ACATTTGGGCCCCTCTGGCTGGTACTTGCGGGGTCCTGCTGCTTTC |
| | | ACTCGTGATCACTCTTTACTGTAAGCGCGGTCGGAAGAAGCTGCT |
| | | GTACATCTTTAAGCAACCCTTCATGAGGCCTGTGCAGACTACTCA |
| | | AGAGGAGGACGGCTGTTCATGCCGGTTCCCAGAGGAGGAGGAAG |
| | | GCGGCTGCGAACTGCGCGTGAAATTCAGCCGCAGCGCAGATGCT |
| | | CCAGCCTACAAGCAGGGGCAGAACCAGCTCTACAACGAACTCAA |
| | | TCTTGGTCGGAGAGAGGAGTACGACGTGCTGGACAAGCGGAGAG |
| | | GACGGGACCCAGAAATGGGCGGGAAGCCGCGCAGAAAGAATCCC |
| | | CAAGAGGGCCTGTACAACGAGCTCCAAAAGGATAAGATGGCAGA |
| | | AGCCTATAGCGAGATTGGTATGAAAGGGGAACGCAGAAGAGGCA |
| | | AAGGCCACGACGGACTGTACCAGGGACTCAGCACCGCCACCAAG |
| | | GACACCTATGACGCTCTTCACATGCAGGCCCTGCCGCCTCGG |

[0724] In one embodiment, the CAR molecule comprises (or consists of) an amino acid sequence provided in Table 13, or Table 1 of WO2016/014565, or as otherwise described herein. In one embodiment, the CAR molecule comprises (or consists of) an amino acid sequence of SEQ ID NO: 849, SEQ ID NO: 850, SEQ ID NO: 851, SEQ ID NO: 852, SEQ ID NO: 853, SEQ ID NO: 854, SEQ ID NO: 855, SEQ ID NO: 856, SEQ ID NO: 857, SEQ ID NO: 858, SEQ ID NO: 859, SEQ ID NO: 860, SEQ ID NO: 861, SEQ ID NO: 862, SEQ ID NO: 863, SEQ ID NO: 879, SEQ ID NO: 880, SEQ ID NO: 881, SEQ ID NO: 882, SEQ ID NO: 883, SEQ ID NO: 884, SEQ ID NO: 885, SEQ ID NO: 886, SEQ ID NO: 887, SEQ ID NO: 888, SEQ ID NO: 889, SEQ ID NO: 890, SEQ ID NO: 891, SEQ ID NO: 892, SEQ ID NO: 893, SEQ ID NO: 894, SEQ ID NO: 895, SEQ ID NO: 896, SEQ ID NO: 897, SEQ ID NO: 898, or SEQ ID NO: 899; or an amino acid sequence having at least one, two, three, four, five, 10, 15, 20 or 30 modifications (e.g., substitutions, e.g., conservative substitutions) but not more than 60, 50, or 40 modifications (e.g., substitutions, e.g., conservative substitutions) of an amino acid sequence of SEQ ID NO: 849, SEQ ID NO: 850, SEQ ID NO: 851, SEQ ID NO: 852, SEQ ID NO: 853, SEQ ID NO: 854, SEQ ID NO: 855, SEQ ID NO: 856, SEQ ID NO: 857, SEQ ID NO: 858, SEQ ID NO: 859, SEQ ID NO: 860, SEQ ID NO: 861, SEQ ID NO: 862, SEQ ID NO: 863, SEQ ID NO: 879, SEQ ID NO: 880, SEQ ID NO: 881, SEQ ID NO: 882, SEQ ID NO: 883, SEQ ID NO: 884, SEQ ID NO: 885, SEQ ID NO: 886, SEQ ID NO: 887, SEQ ID NO: 888, SEQ ID NO: 889, SEQ ID NO: 890, SEQ ID NO: 891, SEQ ID NO: 892, SEQ ID NO: 893, SEQ ID NO: 894, SEQ ID NO: 895, SEQ ID NO: 896, SEQ ID NO: 897, SEQ ID NO: 898, or SEQ ID NO: 899; or an amino acid sequence having 85%, 90%, 95%, 96%, 97%, 98%, 99% identity to an amino acid sequence of SEQ ID NO: 849, SEQ ID NO: 850, SEQ ID NO: 851, SEQ ID NO: 852, SEQ ID NO: 853, SEQ ID NO: 854, SEQ ID NO: 855, SEQ ID NO: 856, SEQ ID NO: 857, SEQ ID NO: 858, SEQ ID NO: 859, SEQ ID NO: 860, SEQ ID NO: 861, SEQ ID NO: 862, SEQ ID NO: 863, SEQ ID NO: 879, SEQ ID NO: 880, SEQ ID NO: 881, SEQ ID NO: 882, SEQ ID NO: 883, SEQ ID NO: 884, SEQ ID NO: 885, SEQ ID NO: 886, SEQ ID NO: 887, SEQ ID NO: 888, SEQ ID NO: 889, SEQ ID NO: 890, SEQ ID NO: 891, SEQ ID NO: 892, SEQ ID NO: 893, SEQ ID NO: 894 SEQ ID NO: 895, SEQ ID NO: 896, SEQ ID NO: 897, SEQ ID NO: 898, or SEQ ID NO: 899.

[0725] In other embodiments, the CAR-expressing cells can specifically bind to humanized CD22, e.g., can include a CAR molecule, or an antigen binding domain (e.g., a humanized antigen binding domain) according to WO2016/164731, incorporated herein by reference.

[0726] In embodiments, the CAR molecule comprises an antigen binding domain that binds specifically to CD22 (CD22 CAR). In one embodiment, the antigen binding domain targets human CD22. In one embodiment, the antigen binding domain includes a single chain Fv sequence as described herein.

[0727] The sequences of human CD22 CAR are provided below. In some embodiments, a human CD22 CAR is CAR22-65.

Human CD22 CAR scFv sequence
(SEQ ID NO: 1850)
EVQLQQSGPGINKPSQTLSLTCAISGDSMLSNSDTWNWIRQSPSRGLEWL
GRTYHRSTWYDDYASSVRGRVSINVDTSKNQYSLQLNAVTPEDTGVYYCA
RVRLQDGNSWSDAFDVWGQGTMVTVSSGGGGSGGGGSGGGGSQSALTQPA
SASGSPGQSVTISCTGTSSDVGGYNYVSWYQQHPGKAPKLMIYDVSNRPS
GVSNRFSGSKSGNTASLTISGLQAEDEADYYCSSYTSSSTLYVFGTGTQL
TVL
Human CD22 CAR heavy chain variable region
(SEQ ID NO: 1851)
EVQLQQSGPGLVKPSQTLSLTCAISGDSMLSNSDTWNWIRQSPSRGLEWL
GRTYHRSTWYDDYASSVRGRVSINVDTSKNQYSLQLNAVTPEDTGVYYCA
RVRLQDGNSWDAFDVWGQGTMVTVSS
Human CD22 CAR light chain variable region
(SEQ ID NO: 1852)
QSALTQPASASGSPGQSVTISCTGTSSDVGGYNYVSWYQQHPGKAPKLMI
YDVSNRPSGVSNRFSGSKSGNTASLTISGLQAEDEADYYCSSYTSSSTLY
VFGTGTQLTVL

TABLE EE
Heavy Chain Variable Domain CDRs of CD22 CAR (CAR22-65)

| | | SEQ ID | | SEQ | | SEQ ID |
|---|---|---|---|---|---|---|
| Candidate | HCDR1 | NO: | HCDR2 | ID NO: | HCDR3 | NO: |
| CAR22-65 | GDSMLSN | 1853 | RTYHRSTWYDDYASSVRG | 922 | VRLQDGNSWSDAFDV | 1855 |
| Combined | SDTWN | | | | | |
| CAR22-65 | SNSDTWN | 1854 | RTYHRSTWYDDYASSVRG | 923 | VRLQDGNSWSDAFDV | 1856 |
| Kabat | | | | | | |

TABLE FF
Light Chain Variable Domain CDRs of CD22 CAR (CAR22-65). The LC CDR
sequences in this table have the same sequence under the Kabat or
combined definitions.

| | | SEQ ID | | SEQ ID | | SEQ ID |
|---|---|---|---|---|---|---|
| Candidate | LCDR1 | NO: | LCDR2 | NO: | LCDR3 | NO: |
| CAR22-65 | TGTSSDVGGYNYVS | 1857 | DVSNRPS | 924 | SSYTSSSTLYV | 1858 |
| Combined | | | | | | |

[0728] In some embodiments, the antigen binding domain comprises a HC CDR1, a HC CDR2, and a HC CDR3 of any heavy chain binding domain amino acid sequences listed in Table EE. In embodiments, the antigen binding domain further comprises a LC CDR1, a LC CDR2, and a LC CDR3. In embodiments, the antigen binding domain comprises a LC CDR1, a LC CDR2, and a LC CDR3 amino acid sequences listed in Table FF.

[0729] In some embodiments, the antigen binding domain comprises one, two or all of LC CDR1, LC CDR2, and LC CDR3 of any light chain binding domain amino acid sequences listed in Table FF, and one, two or all of HC CDR1, HC CDR2, and HC CDR3 of any heavy chain binding domain amino acid sequences listed in Table EE.

[0730] In some embodiments, the CDRs are defined according to the Kabat numbering scheme, the Chothia numbering scheme, or a combination thereof.

[0731] The order in which the VL and VH domains appear in the scFv can be varied (i.e., VL-VH, or VH-VL orientation), and where any of one, two, three or four copies of the “G4S” (SEQ ID NO: 834) subunit, in which each subunit comprises the sequence GGGGS (SEQ ID NO: 834) (e.g., (G4S)₃ (SEQ ID NO: 35) or (G4S)₄ (SEQ ID NO: 34)), can connect the variable domains to create the entirety of the scFv domain. Alternatively, the CAR construct can include, for example, a linker including the sequence GSTSGSGKPGSGEGSTKG (SEQ ID NO: 38). Alternatively, the CAR construct can include, for example, a linker including the sequence LAEAAAK (SEQ ID NO: 1859). In an embodiment, the CAR construct does not include a linker between the VL and VH domains.

[0732] Exemplary sequences of the CD22 CARs are provided below in Table GG.

TABLE GG
Exemplary CD22 CAR Constructs

| SEQ ID | | |
|---|---|---|
| NUMBER | Ab region | Sequence |
| CD22-65s, ss or | | |
| KD | | |
| SEQ ID NO: 834 | Linker | GGGGS |
| CD22-65s | scFv (VH- | EVQLQQSGPGLVKPSQTLSLTCAISGDSMLSNSDTWNW |
| SEQ ID NO): | linker-VL) of | IRQSPSRGLEWLGRTYHRSTWYDDYASSVRGRVSINVD |
| 1860 | CD22-65s | TSKNQYSLQLNAVTPEDTGVYYCARVRLQDGNSWSDA |
| | (linker | [chemical structure] |
| | shown by | TISCTGTSSDVGGYNYVSWYQQHPGKAPKLMIYDVSNR |
| | italics and | PSGVSNRFSGSKSGNTASLTISGLQAEDEADYYCSSYTS |
| | underline) | SSTLYVFGTGTQLTVL |
| CD22-65ss | scFv (VH- | EVQLQQSGPGLVKPSQTLSLTCAISGDSMLSNSDTWNW |
| SEQ ID NO: | VL) of | IRQSPSRGLEWLGRTYHRSTWYDDYASSVRGRVSINVD |
| 1861 | CD22-65ss | TSKNQYSLQLNAVTPEDTGVYYCARVRLQDGNSWSDA |
| | (no linker | FDVWGQGTMVTVSSQSALTQPASASGSPGQSVTISCTG |
| | between VH- | TSSDVGGYNYVSWYQQHPGKAPKLMIYDVSNRPSGVS |
| | VL) | NRFSGSKSGNTASLTISGLQAEDEADYYCSSYTSSSTLY |
| | | VFGTGTQLTVL |
| CD22-65sKD | scFv (VH- | EVQLQQSGPGLVKPSQTLSLTCAISGDSMLSNSDTWNW |
| SEQ ID NO: | linker-VL) of | IRKSPSRGLEWLGRTYHRSTWYDDYASSVRGRVSINVD |
| 1862 | CD22-65 | TSKNQYSLQLNAVTPEDTGVYYCARVRLQDGNSWSDA |
| | sKD | [chemical structure] |
| | | TISCTGTSSDVGGYNYVSWYQDHPGKAPKLMIYDVSNR |
| | | PSGVSNRFSGSKSGNTASLTISGLQAEDEADYYCSSYTS |
| | | SSTLYVFGTGTQLTVL |
| SEQ ID NO: | VH of | EVQLQQSGPGLVKPSQTLSLTCAISGDSMLSNSDTWNW |
| 1863 | CD22-65 | IRKSPSRGLEWLGRTYHRSTWYDDYASSVRGRVSINVD |
| | sKD | TSKNQYSLQLNAVTPEDTGVYYCARVRLQDGNSWSDA |
| | | FDVWGQGTMVTVSS |
| SEQ ID NO: | VL of CD22- | QSALTQPASASGSPGQSVTISCTGTSSDVGGYNYVSWY |
| 1864 | 65 sKD | QDHPGKAPKLMIYDVSNRPSGVSNRFSGSKSGNTASLTI |
| | | SGLQAEDEADTTCSSYTSSSTLYVFGTGTQLTVL |

[0733] These clones all contained a QK residue change in the signal domain of the co-stimulatory domain derived from CD3zeta chain.

### Transmembrane Domains

[0734] With respect to the transmembrane domain, in various embodiments, a CAR can be designed to comprise a transmembrane domain that is attached to the extracellular domain of the CAR, e.g., attached to any of the antigen binding domains listed above. The transmembrane domain can also, in some embodiments, be attached to an intracellular domain of the CAR (e.g., a costimulatory and/or primary signalling domain). A transmembrane domain can include one or more additional amino acids adjacent to the transmembrane region, e.g., one or more amino acid associated with the extracellular region of the protein from which the transmembrane was derived (e.g., 1, 2, 3, 4, 5, 6, 7, 8, 9, 10 up to 15 amino acids of the extracellular region) and/or one or more additional amino acids associated with the intracellular region of the protein from which the transmembrane protein is derived (e.g., 1, 2, 3, 4, 5, 6, 7, 8, 9, 10 up to 15 amino acids of the intracellular region). In one aspect, the transmembrane domain is one that is associated with one of the other domains of the CAR e.g., in one embodiment, the transmembrane domain may be from the same protein that the signaling domain, costimulatory domain or the hinge domain is derived from. In another aspect, the transmembrane domain is not derived from the same protein that any other domain of the CAR is derived from. In some instances, the transmembrane domain can be selected or modified by amino acid substitution to avoid binding of such domains to the transmembrane domains of the same or different surface membrane proteins, e.g., to minimize interactions with other members of the receptor complex. In one aspect, the transmembrane domain is capable of homodimerization with another CAR on the cell surface of a CAR-expressing cell. In a different aspect, the amino acid sequence of the transmembrane domain may be modified or substituted so as to minimize interactions with the binding domains of the native binding partner present in the same CAR-expressing cell.

[0735] The transmembrane domain may be derived either from a natural or from a recombinant source. Where the source is natural, the domain may be derived from any membrane-bound or transmembrane protein. In one aspect the transmembrane domain is capable of signaling to the intracellular domain(s) whenever the CAR has bound to a target. A transmembrane domain of particular use may include at least the transmembrane region(s) of e.g., the alpha, beta or zeta chain of the T-cell receptor, CD28, CD27, CD3 epsilon, CD45, CD4, CD5, CD8, CD9, CD16, CD22, CD33, CD37, CD64, CD80, CD86, CD134, CD137, CD154, or transmembrane region derived from any of the alpha, beta or zeta chain of the T-cell receptor, CD28, CD27, CD3 epsilon, CD45, CD4, CD5, CD8, CD9, CD16, CD22, CD33, CD37, CD64, CD80, CD86, CD134, CD137, CD154. In some embodiments, a transmembrane domain may include at least the transmembrane region(s) of, e.g., KIRDS2, OX40, CD2, CD27, LFA-1 (CD11a, CD18), ICOS (CD278), 4-1BB (CD137), GITR, CD40, BAFFR, HVEM (LIGHTR), SLAMF7, NKp80 (KLRF1), NKp44, NKp30, NKp46, CD160, CD19, IL2R beta, IL2R gamma, IL7R α, ITGA1, VLA, CD49a, ITGA4, IA4, CD49D, ITGA6, VLA-6, CD49f, ITGAD, CD11d, ITGAE, CD103, ITGAL, CD11a, LFA-1, ITGAM, CD11b, ITGAX, CD11c, ITGB1, CD29, ITGB2, CD18, LFA-1, ITGB7, TNFR2, DNAM1 (CD226), SLAMF4 (CD244, 2B4), CD84, CD96 (Tactile), CEACAM1, CRTAM, Ly9 (CD229), CD160 (BY55), PSGL1, CD100 (SEMA4D), SLAMF6 (NTB-A, Ly108), SLAM (SLAMF1, CD150, IPO-3), BLAME (SLAMF8), SELPLG (CD162), LTBR, PAG/Cbp, NKG2D, NKG2C or a transmembrane domain derived from any protein thereof.

[0736] In some instances, the transmembrane domain can be attached to the extracellular region of the CAR, e.g., the antigen binding domain of the CAR, via a hinge, e.g., a hinge from a human protein. For example, in one embodiment, the hinge can be a human Ig (immunoglobulin) hinge (e.g., an IgG4 hinge, an IgD hinge), a GS linker (e.g., a GS linker described herein), a KIR2DS2 hinge or a CD8a hinge. In one embodiment, the hinge or spacer comprises (or consists of) the amino acid sequence of SEQ ID NO: 5. In one aspect, the transmembrane domain comprises (or consists of) a transmembrane domain of SEQ ID NO: 13.

[0737] In certain embodiments, the encoded transmembrane domain comprises an amino acid sequence of a CD8 transmembrane domain having at least one, two or three modifications but not more than 20, 10 or 5 modifications of an amino acid sequence of SEQ ID NO: 13, or a sequence with 95-99% identity to an amino acid sequence of SEQ ID NO: 13. In one embodiment, the encoded transmembrane domain comprises the A sequence of SEQ ID NO:13.

[0738] In other embodiments, the nucleic acid molecule encoding the CAR comprises a nucleotide sequence of a CD8 transmembrane domain, e.g., comprising the sequence of SEQ ID NO: 14, or a sequence with 95-99% identity thereof.

[0739] In certain embodiments, the encoded antigen binding domain is connected to the transmembrane domain by a hinge region. In one embodiment, the encoded hinge region comprises the amino acid sequence of a CD8 hinge, e.g., SEQ ID NO: 5; or the amino acid sequence of an IgG4 hinge, e.g., SEQ ID NO: 7, or a sequence with 95-99% identity to SEQ ID NO: 5 or 7. In other embodiments, the nucleic acid sequence encoding the hinge region comprises a sequence of SEQ ID NO: 6 or SEQ ID NO: 8, corresponding to a CD8 hinge or an IgG4 hinge respectively, or a sequence with 95-99% identity to SEQ ID NO:6 or 8.

[0740] In one aspect, the hinge or spacer comprises an IgG4 hinge. For example, in one embodiment, the hinge or spacer comprises a hinge of the amino acid sequence

(SEQ ID NO: 7)
ESKYGPPCPPCPAPEFLGGPSVFLFPPKPKDTLMISRTPEVTCVVVVDVS
QEDPEVQFNWYVDGVEVHNAKTKPREEQFNSTYRVVSVLTVLHQDWLNGK
EYKCKVSNKGLPSSIEKTISKAKGQPREPQVYTLPPSQEEMTKNQVSLTC
LVKGFYPSDIAVEWESNGQPENNYKTTPPVLDSDGSFFLYSRLTVDKSRW
QEGNVFSCSVMHEALHNHYTQKSLSLSLGKM.

In some embodiments, the hinge or spacer comprises a hinge encoded by a nucleotide sequence of

(SEQ ID NO: 8)
GAGAGCAAGTACGGCCCTCCCTGCCCCCCTTGCCCTGCCCCCGAGTTCCT
GGGCGGACCCAGCGTGTTCCTGTTCCCCCCCAAGCCCAAGGACACCCTGA
TGATCAGCCGGACCCCCGAGGTGACCTGTGTGGTGGTGGACGTGTCCCAG
GAGGACCCCGAGGTCCAGTTCAACTGGTACGTGGACGGCGTGGAGGTGCA
CAACGCCAAGACCAAGCCCCGGGAGGAGCAGTTCAATAGCACCTACCGGG
TGGTGTCCGTGCTGACCGTGCTGCACCAGGACTGGCTGAACGGCAAGGAA
TACAAGTGTAAGGTGTCCAACAAGGGCCTGCCCAGCAGCATCGAGAAAAC
CATCAGCAAGGCCAAGGGCCAGCCTCGGGAGCCCCAGGTGTACACCCTGC
CCCCTAGCCAAGAGGAGATGACCAAGAACCAGGTGTCCCTGACCTGCCTG
GTGAAGGGCTTCTACCCCAGCGACATCGCCGTGGAGTGGGAGAGCAACGG
CCAGCCCGAGAACAACTACAAGACCACCCCCCCTGTGCTGGACAGCGACG
GCAGCTTCTTCCTGTACAGCCGGCTGACCGTGGACAAGAGCCTACACCCA
GAAGAGCCTGAGCCTGTCCCTGGGCAAGATG.

[0741] In one aspect, the hinge or spacer comprises an IgD hinge. For example, in one embodiment, the hinge or spacer comprises a hinge of the amino acid sequence

(SEQ ID NO: 9)
RWPESPKAQASSVPTAQPQAEGSLAKATTAPATTRNTGRGGEEKKKEKEK
EEQEERETKTPECPSHTQPLGVYLLTPAVQDLWLRDKATFTCFVVGSDLK
DAHLTWEVAGKVPTGGVEEGLLERHSNGSQSQHSRLTLPRSLWNAGTSVT
CTLNHPSLPPQRLMALREPAAQAPVKLSLNLLASSDPPEAASWLLCEVSG
FSPPNILLMWLEDQREVNTSGFAPARPPPQPGSTTFWAWSVLRVPAPPSP
QPATYTCVVSHEDSRTLLNASRSLEVSYVTDH.

In some embodiments, the hinge or spacer comprises a hinge encoded by a nucleotide sequence of

(SEQ ID NO: 10)
AGGTGGCCCGAAAGTCCCAAGGCCCAGGCATCTAGTGTTCCTACTGCACA
GCCCCAGGCAGAAGGCAGCCTAGCCAAAGCTACTACTGCACCTGCCACTA
CGCGCAATACTGGCCGTGGCGGGGAGGAGAAGAAAAAGGAGAAAGAGAAA
GAAGAACAGGAAGAGAGGGAGACCAAGACCCCTGAATGTCCCATACCCAG
CCGCTGGGCGTCTATCTCTTGACTCCCGCAGTACAGGACTTGTGGCTTAG
AGATAAGGCCACCTTTACATGTTTCGTCGTGGGCTCTGACCTGAAGGATG
CCCATTTGACTGGGAGGTTGCCGGAAAGGTACCCACAGGGGGGGTTGAGG
AAGGGTTGCTGGAGCGCCATTCCAATGGCTCTCAGAGCCAGCACTCAAGA
CTCACCCTTCCGAGATCCCTGTGGAACGCCGGGACCTCTGTCACATGTAC
TCTAAATCATCCTAGCCTGCCCCCACAGCGTCTGATGGCCCTTAGAGAGC
CAGCCGCCCAGGCACCAGTTAAGCTTAGCCTGAATCTGCTCGCCAGTAGT
GATCCCCCAGAGGCCGCCAGCTGGCTCTTATGCGAAGTGTCCGGCTTTAG
CCCGCCCAACATCTTGCTCATGTGGCTGGAGGACCAGCGAGAAGTGAACA
CCAGCGGCTTCGCTCCAGCCCGGCCCCCACCCCAGCCGGGTTCTACCACA
TTCTGGGCCTGGAGTGTCTTAAGGGTCCCAGCACCACCTAGCCCCCAGCC
AGCCACATACACCTGTGTTGTGTCCCATGAAGATAGCAGGACCCTGCTAA
ATGCTTCTAGGAGTCTGGAGGTTTCCTACGTGACTGACCATT.

[0742] In one aspect, the transmembrane domain may be recombinant, in which case it will comprise predominantly hydrophobic residues such as leucine and valine. In one aspect a triplet of phenylalanine, tryptophan and valine can be found at each end of a recombinant transmembrane domain.

[0743] Optionally, a short oligo- or polypeptide linker, between 2 and 10 amino acids in length may form the linkage between the transmembrane domain and the cytoplasmic region of the CAR. A glycine-serine doublet provides a particularly suitable linker. For example, in one aspect, the linker comprises the amino acid sequence of GGGGSGGGGS (SEQ ID NO:11). In some embodiments, the linker is encoded by a nucleotide sequence of GGTGGCGGAGGTTCTGGAGGTGGAGGTTCC (SEQ ID NO:12).

[0744] In one aspect, the hinge or spacer comprises a KIR2DS2 hinge.

### Signaling Domains

[0745] In embodiments having an intracellular signaling domain, such a domain can contain, e.g., one or more of a primary signaling domain and/or a costimulatory signaling domain. In some embodiments, the intracellular signaling domain comprises a sequence encoding a primary signaling domain. In some embodiments, the intracellular signaling domain comprises a costimulatory signaling domain. In some embodiments, the intracellular signaling domain comprises a primary signaling domain and a costimulatory signaling domain.

[0746] The intracellular signaling sequences within the cytoplasmic portion of the CAR may be linked to each other in a random or specified order. Optionally, a short oligo- or polypeptide linker, for example, between 2 and 10 amino acids (e.g., 2, 3, 4, 5, 6, 7, 8, 9, or 10 amino acids) in length may form the linkage between intracellular signaling sequences. In one embodiment, a glycine-serine doublet can be used as a suitable linker. In one embodiment, a single amino acid, e.g., an alanine, a glycine, can be used as a suitable linker.

[0747] In one aspect, the intracellular signaling domain is designed to comprise two or more, e.g., 2, 3, 4, 5, or more, costimulatory signaling domains. In an embodiment, the two or more, e.g., 2, 3, 4, 5, or more, costimulatory signaling domains, are separated by a linker molecule, e.g., a linker molecule described herein. In one embodiment, the intracellular signaling domain comprises two costimulatory signaling domains. In some embodiments, the linker molecule is a glycine residue. In some embodiments, the linker is an alanine residue.

### Primary Signaling Domains

[0748] A primary signaling domain regulates primary activation of the TCR complex either in a stimulatory way, or in an inhibitory way. Primary intracellular signaling domains that act in a stimulatory manner may contain signaling motifs which are known as immunoreceptor tyrosine-based activation motifs or ITAMs.

[0749] Examples of ITAM containing primary intracellular signaling domains that are of particular use include those of, or derived from, CD3 zeta, common FcR gamma (FCER1G) Fc gamma RIIa, FcR beta (Fc Epsilon R1b), CD3 gamma, CD3 delta, CD3 epsilon, CD79a, CD79b, DAP10, and DAP12. In one embodiment, a CAR comprises an intracellular signaling domain, e.g., a primary signaling domain of CD3-zeta.

[0750] In one embodiment, the encoded primary signaling domain comprises a functional signaling domain of CD3 zeta, or comprises a functional signaling domain derived from CD3 zeta. The encoded CD3 zeta primary signaling domain can comprise an amino acid sequence having at least one, two or three modifications but not more than 20, 10 or 5 modifications of an amino acid sequence of SEQ ID NO: 21 or SEQ ID NO: 24, or a sequence with 95-99% identity to an amino acid sequence of SEQ ID NO: 21 or SEQ ID NO: 24. In some embodiments, the encoded primary signaling domain comprises a sequence of SEQ ID NO: 21 or SEQ ID NO: 24. In other embodiments, the nucleic acid sequence encoding the primary signaling domain comprises a sequence of SEQ ID NO: 22 or SEQ ID NO: 25, or a sequence with 95-99% identity thereof.

### Costimulatory Signaling Domains

[0751] In some embodiments, the encoded intracellular signaling domain comprises a costimulatory signaling domain. For example, the intracellular signaling domain can comprise a primary signaling domain and a costimulatory signaling domain. In some embodiments, the encoded costimulatory signaling domain comprises a functional signaling domain of a protein chosen from one or more of CD27, CD28, 4-1BB (CD137), OX40, CD30, CD40, PD-1, ICOS, lymphocyte function-associated antigen-1 (LFA-1), CD2, CD7, LIGHT, NKG2C, B7-H3, a ligand that specifically binds with CD83, CDS, ICAM-1, GITR, BAFFR, HVEM (LIGHTR), SLAMF7, NKp80 (KLRF1), CD160, CD19, CD4, CD8alpha, CD8beta, IL2R beta, IL2R gamma, IL7R alpha, ITGA4, VLA1, CD49a, ITGA4, IA4, CD49D, ITGA6, VLA-6, CD49f, ITGAD, CD11d, ITGAE, CD103, ITGAL, CD11a, LFA-1, ITGAM, CD11b, ITGAX, CD11c, ITGB1, CD29, ITGB2, CD18, LFA-1, ITGB7, TNFR2, TRANCE/RANKL, DNAM1 (CD226), SLAMF4 (CD244, 2B4), CD84, CD96 (Tactile), CEACAM1, CRTAM, Ly9 (CD229), CD160 (BY55), PSGL1, CD100 (SEMA4D), CD69, SLAMF6 (NTB-A, Ly108), SLAM (SLAMF1, CD150, IPO-3), BLAME (SLAMF8), SELPLG (CD162), LTBR, LAT, GADS, SLP-76, PAG/Cbp, NKp44, NKp30, NKp46, or NKG2D, or a functional signaling domain derived from the functional signaling domain of a protein listed above.

[0752] In certain embodiments, the encoded costimulatory signaling domain comprises an amino acid sequence having at least one, two or three modifications but not more than 20, 10 or 5 modifications of an amino acid sequence of SEQ ID NO: 16 or SEQ ID NO: 19, or a sequence with 95-99% identity to an amino acid sequence of SEQ ID NO: 16 or SEQ ID NO: 19. In one embodiment, the encoded costimulatory signaling domain comprises a sequence of SEQ ID NO: 16 or SEQ ID NO: 19. In other embodiments, the nucleic acid sequence encoding the costimulatory signaling domain comprises a sequence of SEQ ID NO: 17 or SEQ ID NO: 20, or a sequence with 95-99% identity thereof.

[0753] In other embodiments, the encoded intracellular domain comprises the sequence of SEQ ID NO: 16 or SEQ ID NO: 19, and the sequence of SEQ ID NO: 21 or SEQ ID NO: 24, wherein the sequences comprising the intracellular signaling domain are expressed in the same frame and as a single polypeptide chain.

[0754] In certain embodiments, the nucleic acid sequence encoding the intracellular signaling domain comprises a sequence of SEQ ID NO: 17 or SEQ ID NO: 20, or a sequence with 95-99% identity thereof, and a sequence of SEQ ID NO: 22 or SEQ ID NO: 25, or a sequence with 95-99% identity thereof.

[0755] In some embodiments, the nucleic acid molecule further encodes a leader sequence. In one embodiment, the leader sequence comprises the sequence of SEQ ID NO: 2.

[0756] In one aspect, the intracellular signaling domain is designed to comprise the signaling domain of CD3-zeta and the signaling domain of CD28. In one aspect, the intracellular signaling domain is designed to comprise the signaling domain of CD3-zeta and the signaling domain of 4-1BB. In one aspect, the signaling domain of 4-1BB is a signaling domain of SEQ ID NO: 16. In one aspect, the signaling domain of CD3-zeta is a signaling domain of SEQ ID NO: 21.

[0757] In one aspect, the intracellular signaling domain is designed to comprise the signaling domain of CD3-zeta and the signaling domain of CD27. In one aspect, the signaling domain of CD27 comprises an amino acid sequence of

(SEQ ID NO: 19)
QRRKYRSNKGESPVEPAEPCRYSCPREEEGSTIPIQEDYRKPEPACSP.

In one aspect, the signalling domain of CD27 is encoded by a nucleic acid sequence of

(SEQ ID NO: 20)
AGGAGTAAGAGGAGCAGGCTCCTGCACAGTGACTACATGAACATGACTCC
CCGCCGCCCCGGGCCCACCCGCAAGCATTACCAGCCCTATGCCCCACCAC
GCGACTTCGCAGCCTATCGCTCC.

### Vectors

[0758] In another aspect, the disclosure pertains to a vector comprising a nucleic acid sequence encoding a CAR described herein. In one embodiment, the vector is chosen from a DNA vector, an RNA vector, a plasmid, a lentivirus vector, adenoviral vector, or a retrovirus vector. In one embodiment, the vector is a lentivirus vector. These vectors or portions thereof may, among other things, be used to create template nucleic acids, as described herein for use with the CRISPR systems as described herein. Alternatively, the vectors may be used to deliver nucleic acid directly to the cell, e.g., the immune effector cell, e.g., the T cell, e.g., the allogeneic T cell, independent of the CRISPR system.

[0759] The present disclosure also provides vectors in which a DNA is inserted. Vectors derived from retroviruses such as the lentivirus are suitable tools to achieve long-term gene transfer since they allow long-term, stable integration of a transgene and its propagation in daughter cells. Lentiviral vectors have the added advantage over vectors derived from onco-retroviruses such as murine leukemia viruses in that they can transduce non-proliferating cells, such as hepatocytes. They also have the added advantage of low immunogenicity. A retroviral vector may also be, e.g., a gammaretroviral vector. A gammaretroviral vector may include, e.g., a promoter, a packaging signal (ψ), a primer binding site (PBS), one or more (e.g., two) long terminal repeats (LTR), and a transgene of interest, e.g., a gene encoding a CAR. A gammaretroviral vector may lack viral structural gens such as gag, pol, and env. Exemplary gammaretroviral vectors include Murine Leukemia Virus (MLV), Spleen-Focus Forming Virus (SFFV), and Myeloproliferative Sarcoma Virus (MPSV), and vectors derived therefrom. Other gammaretroviral vectors are described, e.g., in Tobias Maetzig et al., “Gammaretroviral Vectors: Biology, Technology and Application” Viruses. 2011 June; 3(6): 677-713.

[0760] In another embodiment, the vector comprising the nucleic acid encoding the desired CAR is an adenoviral vector (A5/35). In another embodiment, the expression of nucleic acids encoding CARs can be accomplished using of transposons such as sleeping beauty, crisper, CAS9, and zinc finger nucleases. See June et al. 2009 Nature Reviews Immunology 9.10: 704-716, is incorporated herein by reference.

[0761] The nucleic acid can be cloned into a number of types of vectors. For example, the nucleic acid can be cloned into a vector including, but not limited to a plasmid, a phagemid, a phage derivative, an animal virus, and a cosmid. Vectors of particular interest include expression vectors, replication vectors, probe generation vectors, and sequencing vectors.

[0762] Disclosed herein are methods for producing an in vitro transcribed RNA CAR. The present disclosure also includes a CAR encoding RNA construct that can be directly transfected into a cell. A method for generating mRNA for use in transfection can involve in vitro transcription (IVT) of a template with specially designed primers, followed by polyA addition, to produce a construct containing 3′ and 5′ untranslated sequence (“UTR”), a 5′ cap and/or Internal Ribosome Entry Site (IRES), the nucleic acid to be expressed, and a polyA tail, typically 50-2000 bases in length (SEQ ID NO: 1873). RNA so produced can efficiently transfect different kinds of cells. In one aspect, the template includes sequences for the CAR.

### Non-Viral Delivery Methods

[0763] In some aspects, non-viral methods can be used to deliver a nucleic acid encoding a CAR described herein into a cell or tissue or a subject.

[0764] In some embodiments, the non-viral method includes the use of a transposon (also called a transposable element). In some embodiments, a transposon is a piece of DNA that can insert itself at a location in a genome, for example, a piece of DNA that is capable of self-replicating and inserting its copy into a genome, or a piece of DNA that can be spliced out of a longer nucleic acid and inserted into another place in a genome. For example, a transposon comprises a DNA sequence made up of inverted repeats flanking genes for transposition.

[0765] In some embodiments, cells, e.g., T or NK cells, are generated that express a CAR described herein by using a combination of gene insertion using the SBTS and genetic editing using a nuclease (e.g., Zinc finger nucleases (ZFNs), Transcription Activator-Like Effector Nucleases (TALENs), the CRISPR/Cas system, or engineered meganuclease re-engineered homing endonucleases). In specific embodiments, the use of the gene editing system inserts the nucleic acid sequence encoding the CAR at a plurality of defined loci, e.g., within a first target, i.e., a molecule that regulates the expression of MHC II, e.g., within a sequence listed in Table 3, and a second target. i.e., a component of the T cell system, and optionally a third target, i.e., a molecule that regulates the expression of MHC I.

[0766] In some embodiments, modified cells as disclosed herein, e.g., T or NK cells, e.g., autologous or allogeneic T cells, e.g., described herein, (e.g., that express a CAR described herein) are generated by contacting the cells with (a) a composition comprising one or more gRNA molecules, e.g., as described herein, and one or more Cas molecules, e.g., a Cas9 molecule, e.g., as described herein, and (b) nucleic acid comprising sequence encoding a CAR e.g., described herein (such as a template nucleic acid molecule as described herein). Without being bound by theory, said composition of (a), above, will induce a break at or near the genomic DNA targeted by the targeting domain of the gRNA molecule(s), and the nucleic acid of (b) will incorporate, e.g., partially or wholly, into the genome at or near said break, such that upon integration, the encoded CAR molecule is expressed. In some embodiments, the % incorporation of the nucleic acid sequence is at least about 5%, 10%, 15%, 20%, 25%, 30%, 35%, 40%, 45%, 50%, 55%, 60%, 65% or 70% at a time point after the cell is contacted, as measured by a suitable method, e.g., PCR, sequencing, single-cell genotyping, ddPCR genotyping, Southern blot, and/or cell surface staining. In some embodiments, a population of cells is provided, for example, after subsequent selection steps, wherein the nucleic acid sequence is incorporated in, e.g., at least about 10%, 15%, 20%, 25%, 30%, 35%, 40%, 45%, 50%, 55%, 60%, 65%, 70%, 75%, 80%, 85%, 90%, 95%, or 99% of the cells of the population.

[0767] In embodiments, expression of the CAR will be controlled by promoters or other regulatory elements endogenous to the genome (e.g., the promoter controlling expression from the gene in which the nucleic acid of (b) was inserted). In other embodiments, the nucleic acid of (b) further comprises a promoter and/or other regulatory elements, e.g., as described herein, e.g., an EF1-alpha promoter, operably linked to the sequence encoding the CAR, such that upon integration, expression of the CAR is controlled by that promoter and/or other regulatory elements. Additional features relating to use of CRISPR/Cas9 systems, e.g., as described herein, to direct incorporation of nucleic acid sequence encoding a CAR, e.g., as described herein, are described elsewhere in this application, e.g., in the section relating to gene insertion and homologous recombination. In embodiments, the composition of a) above is a composition comprising RNPs comprising the one or more gRNA molecules. In embodiments, RNPs comprising gRNAs targeting unique target sequences are introduced into the cell simultaneously, e.g., as a mixture of RNPs comprising the one or more gRNAs. In embodiments, RNPs comprising gRNAs targeting unique target sequences are introduced into the cell sequentially.

[0768] In some embodiments, the modified cells are generated by contacting a cell with (a) a composition comprising a plurality of gRNA molecules, e.g., as described herein, and one or more Cas molecules, e.g., a Cas9 molecule, e.g., as described herein. (b) a nucleic acid that is capable of disrupting the expression of a molecule that regulates MHC II expression, (c) a nucleic acid that is capable of disrupting the expression of a component of the T cell system, and optionally (d) a nucleic acid that is capable of disrupting the expression of a molecule that regulates MHC I expression. Without being bound by theory, said composition of (a), above, will induce a break at or near the genomic DNA targeted by the targeting domain of the gRNA molecules, and the nucleic acid of (b), (c), and optionally (d) will incorporate, e.g., partially or wholly, into the genome at or near said break, such that upon integration, the expression of MHC II and/or a component of the T cell system are reduced.

[0769] In some embodiments, the modified cells are generated by contacting a cell with (a) a composition comprising one or more gRNA molecules, e.g., as described herein, and one or more Cas molecules, e.g., a Cas9 molecule, e.g., as described herein, (b) a nucleic acid comprising sequence encoding a CAR, and (c) a nucleic acid that is capable of disrupting the expression of a molecule that regulates MHC II expression, (d) a nucleic acid that is capable of disrupting the expression of a component of the T cell system, and optionally (e) a nucleic acid that is capable of disrupting the expression of a molecule that regulates MHC I expression.

[0770] In some embodiments, use of a non-viral method of delivery permits reprogramming of cells, e.g., T or NK cells, and direct infusion of the cells into a subject. Advantages of non-viral vectors include but are not limited to the ease and relatively low cost of producing sufficient amounts required to meet a patient population, stability during storage, and lack of immunogenicity.

### Inhibitory Domains

[0771] In an embodiment, the vector comprises a nucleic acid sequence that encodes a CAR, e.g., a CAR described herein, and a nucleic acid sequence that encodes an inhibitory molecule comprising: an inhKIR cytoplasmic domain: a transmembrane domain, e.g., a KIR transmembrane domain; and an inhibitor cytoplasmic domain, e.g., an ITIM domain, e.g., an inhKIR ITIM domain. In an embodiment the inhibitory molecule is a naturally occurring inhKIR, or a sequence sharing at least 50, 60, 70, 80, 85, 90, 95, or 99% homology with, or that differs by no more than 1, 2, 3, 4, 5, 6, 7, 8, 9, 10, 15, or 20 residues from, a naturally occurring inhKIR.

[0772] In an embodiment, the nucleic acid sequence that encodes an inhibitory molecule comprises: a SLAM family cytoplasmic domain; a transmembrane domain, e.g., a SLAM family transmembrane domain; and an inhibitor cytoplasmic domain, e.g., a SLAM family domain, e.g., an SLAM family ITIM domain. In an embodiment the inhibitory molecule is a naturally occurring SLAM family member, or a sequence sharing at least 50, 60, 70, 80, 85, 90, 95, or 99% homology with, or that differs by no more than 1, 2, 3, 4, 5, 6, 7, 8, 9, 10, 15, or 20 residues from, a naturally occurring SLAM family member.

[0773] In one embodiment, the vector is an in vitro transcribed vector, e.g., a vector that transcribes RNA of a nucleic acid molecule described herein. In one embodiment, the nucleic acid sequence in the vector further comprises a poly(A) tail, e.g., a poly A tail. In one embodiment, the nucleic acid sequence in the vector further comprises a 3′UTR, e.g., a 3′ UTR described herein, e.g., comprising at least one repeat of a 3′UTR derived from human beta-globulin. In one embodiment, the nucleic acid sequence in the vector further comprises promoter, e.g., a T2A promoter.

### Promoters

[0774] In one embodiment, the vector further comprises a promoter. In some embodiments, the promoter is chosen from an EF-1 promoter, a CMV IE gene promoter, an EF-1α promoter, an ubiquitin C promoter, or a phosphoglycerate kinase (PGK) promoter. In one embodiment, the promoter is an EF-1 promoter. In one embodiment, the EF-1 promoter comprises a sequence of SEQ ID NO: 1.

### Host Cells for CAR Expression

[0775] As noted above, in some aspects the disclosure pertains to a cell, e.g., an immune effector cell, (e.g., a population of cells, e.g., a population of immune effector cells) comprising a nucleic acid molecule (e.g., a template nucleic acid molecule), a CAR polypeptide molecule, or a vector as described herein.

[0776] In certain aspects of the present disclosure, immune effector cells, e.g., T cells, can be obtained from a unit of blood collected from a subject using any number of techniques known to the skilled artisan, such as Ficoll™ separation. In one preferred aspect, cells from the circulating blood of an individual are obtained by apheresis. The apheresis product typically contains lymphocytes, including T cells, monocytes, granulocytes, B cells, other nucleated white blood cells, red blood cells, and platelets. In one aspect, the cells collected by apheresis may be washed to remove the plasma fraction and, optionally, to place the cells in an appropriate buffer or media for subsequent processing steps. In one embodiment, the cells are washed with phosphate buffered saline (PBS). In an alternative embodiment, the wash solution lacks calcium and may lack magnesium or may lack many if not all divalent cations.

[0777] Initial activation steps in the absence of calcium can lead to magnified activation. As those of ordinary skill in the art would readily appreciate a washing step may be accomplished by methods known to those in the art, such as by using a semi-automated “flow-through” centrifuge (for example, the Cobe 2991 cell processor, the Baxter CytoMate, or the Haemonetics Cell Saver 5) according to the manufacturer's instructions. After washing, the cells may be resuspended in a variety of biocompatible buffers, such as, for example, Ca-free, Mg-free PBS, PlasmaLyte A, or other saline solution with or without buffer. Alternatively, the undesirable components of the apheresis sample may be removed and the cells directly resuspended in culture media.

[0778] It is recognized that the methods of the application can utilize culture media conditions comprising 5% or less, for example 2%, human AB serum, and employ known culture media conditions and compositions, for example those described in Smith et al., “Ex vivo expansion of human T cells for adoptive immunotherapy using the novel Xeno-free CTS Immune Cell Serum Replacement” Clinical & Translational Immunology (2015) 4, e31: doi:10.1038/cti.2014.31.

[0779] In one aspect, T cells are isolated from peripheral blood lymphocytes by lysing the red blood cells and depleting the monocytes, for example, by centrifugation through a PERCOLL™ gradient or by counterflow centrifugal elutriation.

[0780] The methods described herein can include, e.g., selection of a specific subpopulation of immune effector cells, e.g., T cells, that are a T regulatory cell-depleted population. CD25+ depleted cells, using, e.g., a negative selection technique, e.g., described herein. Preferably, the population of T regulatory depleted cells contains less than 30%, 25%, 20%, 15%, 10%, 5%, 4%, 3%, 2%, 1% of CD25+ cells.

[0781] In one embodiment, T regulatory cells, e.g., CD25+ T cells, are removed from the population using an anti-CD25 antibody, or fragment thereof, or a CD25-binding ligand, IL-2. In one embodiment, the anti-CD25 antibody, or fragment thereof, or CD25-binding ligand is conjugated to a substrate, e.g., a bead, or is otherwise coated on a substrate, e.g., a bead. In one embodiment, the anti-CD25 antibody, or fragment thereof, is conjugated to a substrate as described herein.

[0782] In one embodiment, the T regulatory cells, e.g., CD25+ T cells, are removed from the population using CD25 depletion reagent from Miltenyi™. In one embodiment, the ratio of cells to CD25 depletion reagent is 1e7 cells to 20 uL, or 1e7 cells to 15 uL, or 1e7 cells to 10 uL, or 1e7 cells to 5 uL, or 1e7 cells to 2.5 uL, or 1e7 cells to 1.25 uL. In one embodiment, e.g., for T regulatory cells. e.g., CD25+ depletion, greater than 500 million cells/ml is used. In a further aspect, a concentration of cells of 600, 700, 800, or 900 million cells/ml is used.

[0783] In one embodiment, the population of immune effector cells to be depleted includes about 6×10⁹ CD25+ T cells. In other aspects, the population of immune effector cells to be depleted include about 1×10⁹ to 1×10¹⁰ CD25+ T cell, and any integer value in between. In one embodiment, the resulting population T regulatory depleted cells has 2×10⁹ T regulatory cells, e.g., CD25+ cells, or less (e.g., 1×10⁹, 5×10⁸, 1×10⁸, 5×10⁷, 1×10⁷, or less CD25+ cells).

[0784] In one embodiment, the T regulatory cells, e.g., CD25+ cells, are removed from the population using the CliniMAC system with a depletion tubing set, such as, e.g., tubing 162-01. In one embodiment, the CliniMAC system is run on a depletion setting such as, e.g., DEPLETION2.1.

[0785] Without wishing to be bound by a particular theory, decreasing the level of negative regulators of immune cells (e.g., decreasing the number of unwanted immune cells, e.g., T_{REG} cells), in a subject prior to apheresis or during manufacturing of a CAR-expressing cell product can reduce the risk of subject relapse. For example, methods of depleting TG cells are known in the art. Methods of decreasing T_{REG} cells include, but are not limited to, cyclophosphamide, anti-GITR antibody (an anti-GITR antibody described herein), CD25-depletion, and combinations thereof.

[0786] In some embodiments, the manufacturing methods comprise reducing the number of (e.g., depleting) T_{REG} cells prior to manufacturing of the CAR-expressing cell. For example, manufacturing methods comprise contacting the sample, e.g., the apheresis sample, with an anti-GITR antibody and/or an anti-CD25 antibody (or fragment thereof, or a CD25-binding ligand), e.g., to deplete T_{REG} cells prior to manufacturing of the CAR-expressing cell (e.g., T cell, NK cell) product.

[0787] In an embodiment, a subject is pre-treated with one or more therapies that reduce TRE cells prior to collecting cells for CAR-expressing cell product manufacturing, thereby reducing the risk of subject relapse to CAR-expressing cell treatment. In an embodiment, methods of decreasing T_{REG} cells include, but are not limited to, administration to the subject of one or more of cyclophosphamide, anti-GITR antibody, CD25-depletion, or a combination thereof. Administration of one or more of cyclophosphamide, anti-GITR antibody, CD25-depletion, or a combination thereof, can occur before, during or after an infusion of the CAR-expressing cell product.

[0788] In an embodiment, a subject is pre-treated with cyclophosphamide to reduce T_{REG} cells prior to collecting cells for CAR-expressing cell product manufacturing, thereby reducing the risk of subject relapse to CAR-expressing cell treatment. In an embodiment, a subject is pre-treated with an anti-GITR antibody prior to collection of cells for CAR-expressing cell product manufacturing, thereby reducing the risk of subject relapse to CAR-expressing cell treatment.

[0789] In one embodiment, the population of cells to be removed are neither the regulatory T cells or tumor cells, but cells that otherwise negatively affect the expansion and/or function of CART cells, e.g. cells expressing CD14, CD11b, CD33, CD15, or other markers expressed by potentially immune suppressive cells. In one embodiment, such cells are envisioned to be removed concurrently with regulatory T cells and/or tumor cells, or following said depletion, or in another order.

[0790] The methods described herein can include more than one selection step, e.g., more than one depletion step. Enrichment of a T cell population by negative selection can be accomplished, e.g., with a combination of antibodies directed to surface markers unique to the negatively selected cells. One method is cell sorting and/or selection via negative magnetic immunoadherence or flow cytometry that uses a cocktail of monoclonal antibodies directed to cell surface markers present on the cells negatively selected. For example, to enrich for CD4+ cells by negative selection, a monoclonal antibody cocktail can include antibodies to CD14, CD20, CD11b, CD16, HLA-DR, and CD8.

[0791] The methods described herein can further include removing cells from the population which express a tumor antigen, e.g., a tumor antigen that does not comprise CD25, e.g., CD19, CD30, CD38, CD123, CD20, CD14 or CD11b, to thereby provide a population of T regulatory depleted, e.g., CD25+ depleted, and tumor antigen depleted cells that are suitable for expression of a CAR, e.g., a CAR described herein. In one embodiment, tumor antigen expressing cells are removed simultaneously with the T regulatory, e.g., CD25+ cells. For example, an anti-CD25 antibody, or fragment thereof, and an anti-tumor antigen antibody, or fragment thereof, can be attached to the same substrate, e.g., bead, which can be used to remove the cells or an anti-CD25 antibody, or fragment thereof, or the anti-tumor antigen antibody, or fragment thereof, can be attached to separate beads, a mixture of which can be used to remove the cells. In other embodiments, the removal of T regulatory cells, e.g., CD25+ cells, and the removal of the tumor antigen expressing cells is sequential, and can occur, e.g., in either order.

[0792] Also provided are methods that include removing cells from the population which express a check point inhibitor, e.g., a check point inhibitor described herein, e.g., one or more of PD1+ cells, LAG3+ cells, and TIM3+ cells, to thereby provide a population of T regulatory depleted, e.g., CD25+ depleted cells, and check point inhibitor depleted cells, e.g., PD1+, LAG3+ and/or TIM3+ depleted cells. Exemplary check point inhibitors include B7-H1, B7-1, CD160, P1H, 2B4, PD1, TIM3, CEACAM (e.g., CEACAM-1, CEACAM-3 and/or CEACAM-5), LAG3, TIGIT, CTLA-4, BTLA and LAIR1. In one embodiment, check point inhibitor expressing cells are removed simultaneously with the T regulatory, e.g., CD25+ cells. For example, an anti-CD25 antibody, or fragment thereof, and an anti-check point inhibitor antibody, or fragment thereof, can be attached to the same bead which can be used to remove the cells, or an anti-CD25 antibody, or fragment thereof, and the anti-check point inhibitor antibody, or fragment there, can be attached to separate beads, a mixture of which can be used to remove the cells. In other embodiments, the removal of T regulatory cells, e.g., CD25+ cells, and the removal of the check point inhibitor expressing cells is sequential, and can occur, e.g., in either order.

[0793] Methods described herein can include a positive selection step. For example, T cells can be isolated by incubation with anti-CD3/anti-CD28 (e.g., 3×28)-conjugated beads, such as DYNABEADS® M450 CD3/CD28 T, for a time period sufficient for positive selection of the desired T cells. In one embodiment, the time period is about 30 minutes. In a further embodiment, the time period ranges from 30 minutes to 36 hours or longer and all integer values there between. In a further embodiment, the time period is at least 1, 2, 3, 4, 5, or 6 hours. In yet another embodiment, the time period is 10 to 24 hours, e.g., 24 hours. Longer incubation times may be used to isolate T cells in any situation where there are few T cells as compared to other cell types, such in isolating tumor infiltrating lymphocytes (TIL) from tumor tissue or from immunocompromised individuals. Further, use of longer incubation times can increase the efficiency of capture of CD8+ T cells. Thus, by simply shortening or lengthening the time T cells are allowed to bind to the CD3/CD28 beads and/or by increasing or decreasing the ratio of beads to T cells (as described further herein), subpopulations of T cells can be preferentially selected for or against at culture initiation or at other time points during the process. Additionally, by increasing or decreasing the ratio of anti-CD3 and/or anti-CD28 antibodies on the beads or other surface, subpopulations of T cells can be preferentially selected for or against at culture initiation or at other desired time points.

[0794] In one embodiment, a T cell population can be selected that expresses one or more of IFN-γ, TNFα, IL-17A, IL-2, IL-3, IL-4, GM-CSF, IL-10, IL-13, granzyme B, and perform, or other appropriate molecules, e.g., other cytokines. Methods for screening for cell expression can be determined, e.g., by the methods described in PCT Publication No.: WO 2013/126712.

[0795] For isolation of a desired population of cells by positive or negative selection, the concentration of cells and surface (e.g., particles such as beads) can be varied. In certain aspects, it may be desirable to significantly decrease the volume in which beads and cells are mixed together (e.g., increase the concentration of cells), to ensure maximum contact of cells and beads. For example, in one aspect, a concentration of 10 billion cells/ml, 9 billion/ml, 8 billion/ml, 7 billion/ml, 6 billion/ml, or 5 billion/ml is used. In one aspect, a concentration of 1 billion cells/ml is used. In yet one aspect, a concentration of cells from 75, 80, 85, 90, 95, or 100 million cells/ml is used. In further aspects, concentrations of 125 or 150 million cells/ml can be used.

[0796] Using high concentrations can result in increased cell yield, cell activation, and cell expansion. Further, use of high cell concentrations allows more efficient capture of cells that may weakly express target antigens of interest, such as CD28-negative T cells, or from samples where there are many tumor cells present (e.g., leukemic blood, tumor tissue, etc.). Such populations of cells may have therapeutic value and would be desirable to obtain. For example, using high concentration of cells allows more efficient selection of CD8+ T cells that normally have weaker CD28 expression.

[0797] In a related aspect, it may be desirable to use lower concentrations of cells. By significantly diluting the mixture of T cells and surface (e.g., particles such as beads), interactions between the particles and cells is minimized. This selects for cells that express high amounts of desired antigens to be bound to the particles. For example, CD4+ T cells express higher levels of CD28 and are more efficiently captured than CD8+ T cells in dilute concentrations. In one aspect, the concentration of cells used is 5×10⁶/ml. In other aspects, the concentration used can be from about 1×10⁵/ml to 1×10⁶/ml, and any integer value in between.

[0798] In other aspects, the cells may be incubated on a rotator for varying lengths of time at varying speeds at either 2-10° C., or at room temperature.

[0799] T cells for stimulation can also be frozen after a washing step. Wishing not to be bound by theory, the freeze and subsequent thaw step provides a more uniform product by removing granulocytes and to some extent monocytes in the cell population. After the washing step that removes plasma and platelets, the cells may be suspended in a freezing solution. While many freezing solutions and parameters are known in the art and will be useful in this context, one method involves using PBS containing 20/DMSO and 8% human serum albumin, or culture media containing 10% Dextran 40 and 5% Dextrose, 20% Human Serum Albumin and 7.5% DMSO, or 31.25% Plasmalyte-A, 31.25% Dextrose 5%, 0.45% NaCl, 10% Dextran 40 and 5% Dextrose, 20% Human Serum Albumin, and 7.5% DMSO or other suitable cell freezing media containing for example, Hespan and PlasmaLyte A, the cells then are frozen to −80° C., at a rate of 1° per minute and stored in the vapor phase of a liquid nitrogen storage tank. Other methods of controlled freezing may be used as well as uncontrolled freezing immediately at −20° C., or in liquid nitrogen.

[0800] In certain aspects, cryopreserved cells are thawed and washed as described herein and allowed to rest for one hour at room temperature prior to activation using the methods of the present disclosure.

[0801] Also contemplated in the context of the disclosure is the collection of blood samples or apheresis product from a subject at a time period prior to when the expanded cells as described herein might be needed. As such, the source of the cells to be expanded can be collected at any time point necessary, and desired cells, such as T cells, isolated and frozen for later use in immune effector cell therapy for any number of diseases or conditions that would benefit from immune effector cell therapy, such as those described herein. In one aspect a blood sample or an apheresis is taken from a generally healthy subject. In certain aspects, a blood sample or an apheresis is taken from a generally healthy subject who is at risk of developing a disease, but who has not yet developed a disease, and the cells of interest are isolated and frozen for later use. In certain aspects, the T cells may be expanded, frozen, and used at a later time. In certain aspects, samples are collected from a patient shortly after diagnosis of a particular disease as described herein but prior to any treatments. In a further aspect, the cells are isolated from a blood sample or an apheresis from a subject prior to any number of relevant treatment modalities, including but not limited to treatment with agents such as natalizumab, efalizumab, antiviral agents, chemotherapy, radiation, immunosuppressive agents, such as cyclosporin, azathioprine, methotrexate, mycophenolate, and FK506, antibodies, or other immunoablative agents such as CAMPATH, anti-CD3 antibodies, cytoxan, fludarabine, cyclosporin, FK506, rapamycin, mycophenolic acid, steroids, FR901228, and irradiation.

[0802] In a further aspect, T cells are obtained from a patient directly following treatment that leaves the subject with functional T cells. In this regard, it has been observed that following certain cancer treatments, in particular treatments with drugs that damage the immune system, shortly after treatment during the period when patients would normally be recovering from the treatment, the quality of T cells obtained may be optimal or improved for their ability to expand ex vivo. Likewise, following ex vivo manipulation using the methods described herein, these cells may be in a preferred state for enhanced engraftment and in vivo expansion. Thus, it is contemplated within the context of the present disclosure to collect blood cells, including T cells, dendritic cells, or other cells of the hematopoietic lineage, during this recovery phase. Further, in certain aspects, mobilization (for example, mobilization with GM-CSF) and conditioning regimens can be used to create a condition in a subject wherein repopulation, recirculation, regeneration, and/or expansion of particular cell types is favored, especially during a defined window of time following therapy. Illustrative cell types include T cells, B cells, dendritic cells, and other cells of the immune system.

[0803] In one embodiment, the immune effector cells expressing a CAR molecule, e.g., a CAR molecule described herein, are obtained from a subject that has received a low, immune enhancing dose of an mTOR inhibitor. In an embodiment, the population of immune effector cells, e.g., T cells, to be engineered to express a CAR, are harvested after a sufficient time, or after sufficient dosing of the low, immune enhancing, dose of an mTOR inhibitor, such that the level of PD negative immune effector cells, e.g., T cells, or the ratio of PD negative immune effector cells, e.g., T cells/PD1 positive immune effector cells, e.g., T cells, in the subject or harvested from the subject has been, at least transiently, increased.

[0804] In other embodiments, population of immune effector cells, e.g., T cells, which have, or will be engineered to express a CAR, can be treated ex vivo by contact with an amount of an mTOR inhibitor that increases the number of PD1 negative immune effector cells, e.g., T cells or increases the ratio of PD1 negative immune effector cells, e.g., T cells/PD1 positive immune effector cells, e.g., T cells.

[0805] In one embodiment, a T cell population is diaglycerol kinase (DGK)-deficient. DGK-deficient cells include cells that do not express DGK RNA or protein, or have reduced or inhibited DGK activity. DGK-deficient cells can be generated by genetic approaches, e.g., administering RNA-interfering agents, e.g., siRNA, shRNA, miRNA, to reduce or prevent DGK expression. Alternatively, DGK-deficient cells can be generated by treatment with DGK inhibitors described herein.

[0806] In one embodiment, a T cell population is Ikaros-deficient. Ikaros-deficient cells include cells that do not express Ikaros RNA or protein, or have reduced or inhibited Ikaros activity, Ikaros-deficient cells can be generated by genetic approaches, e.g., administering RNA-interfering agents. e.g., siRNA, shRNA, miRNA, to reduce or prevent Ikaros expression. Alternatively. Ikaros-deficient cells can be generated by treatment with Ikaros inhibitors, e.g., lenalidomide.

[0807] In embodiments, a T cell population is DGK-deficient and Ikaros-deficient, e.g., does not express DGK and Ikaros, or has reduced or inhibited DGK and Ikaros activity. Such DGK and Ikaros-deficient cells can be generated by any of the methods described herein.

[0808] In an embodiment, the NK cells are obtained from the subject. In another embodiment, the NK cells are an NK cell line, e.g., NK-92 cell line (Conkwest).

[0809] In some aspects, the cells (e.g., the immune effector cells, e.g., the CAR-expressing cells) are induced pluripotent stem cells (“iPSCs”) or embryonic stem cells (ESCs), or are T cells generated from (e.g., differentiated from) said iPSC and/or ESC. iPSCs can be generated, for example, by methods known in the art, from peripheral blood T lymphocytes, e.g., peripheral blood T lymphocytes isolated from a healthy volunteer. As well, such cells may be differentiated into T cells by methods known in the art. See e.g., Themeli M. et al., Nat. Biotechnol., 31, pp. 928-933 (2013); doi:10.1038/nbt.2678; WO2014/165707, the contents of each of which are incorporated herein by reference in their entirety.

### Additional Expressed Agents

[0810] In embodiments, the CAR-expressing immune effector cell described herein can express a CAR comprising a conditional expression domain, for example, as described in WO2017/181119, or a CAR comprising a degradation domain as described in WO2017/024318. In some embodiments, a conditional expression domain may be used with a single CAR or with multiple CARs.

[0811] In another embodiment, a CAR-expressing immune effector cell described herein can further express another agent, e.g., an agent which enhances the activity of a CAR-expressing cell. Such additional expressed agents can be introduced together with the CAR, e.g., in the same vector or template nucleic acid, or in a separate vector.

[0812] For example, in one embodiment, the agent can be an agent which inhibits an inhibitory molecule. Examples of inhibitory molecules include PD-1, PD-L1, CTLA-4, TIM-3, CEACAM (e.g., CEACAM-1, CEACAM-3 and/or CEACAM-5), LAG-3, VISTA, BTLA, TIGIT, LAIR1, CD160, 2B4 and TGF beta, e.g., as described herein. In one embodiment, the agent that inhibits an inhibitory molecule comprises a first polypeptide, e.g., an inhibitory molecule, associated with a second polypeptide that provides a positive signal to the cell, e.g., an intracellular signaling domain described herein. In one embodiment, the agent comprises a first polypeptide, e.g., of an inhibitory molecule such as PD-1, PD-L1, CTLA4, TIM-3, CEACAM (e.g., CEACAM-1, CEACAM-3 and/or CEACAM-5), LAG-3, VISTA, BTLA, TIGIT, LAIR1, CD160, 2B4 or TGF beta, or a fragment of any of these, and a second polypeptide which is an intracellular signaling domain described herein (e.g., comprising a costimulatory domain (e.g., 41BB, CD27 or CD28, e.g., as described herein) and/or a primary signaling domain (e.g., a CD3 zeta signaling domain described herein). In one embodiment, the agent comprises a first polypeptide of PD-1 or a fragment thereof, and a second polypeptide of an intracellular signaling domain described herein (e.g., a CD28, CD27, OX40 or 4-IBB signaling domain described herein and/or a CD3 zeta signaling domain described herein). In embodiments, the agent comprises a first polypeptide of an extracellular domain of an inhibitory molecule and a second polypeptide of an intracellular signaling domain of a costimulatory molecule described herein or primary signaling molecule described herein. Such molecules in which an inhibitory molecule (e.g., a domain of an inhibitory molecule) is associated with a molecule that provides a positive signal (e.g., a domain of a costimulatory molecule or primary signaling molecule) are further described in, for example, WO2013/019615.

[0813] In one embodiment, the CAR-expressing immune effector cell described herein can further comprise a second CAR, e.g., a second CAR that includes a different antigen binding domain, e.g., to a different epitope on the same target (e.g., a target described above) or a different target. In one embodiment, the second CAR includes an antigen binding domain to a target expressed on the same cancer cell type as the target of the first CAR. In one embodiment, the CAR-expressing immune effector cell comprises a first CAR that targets a first antigen and includes an intracellular signaling domain having a costimulatory signaling domain but not a primary signaling domain, and a second CAR that targets a second, different, antigen and includes an intracellular signaling domain having a primary signaling domain but not a costimulatory signaling domain.

[0814] While not wishing to be bound by theory, placement of a costimulatory signaling domain, e.g., 4-1BB, CD28, CD27 or OX-40, onto the first CAR, and the primary signaling domain, e.g., CD3 zeta, on the second CAR can limit the CAR activity to cells where both targets are expressed. In one embodiment, the CAR expressing immune effector cell comprises a first CAR that includes an antigen binding domain that targets, e.g., a target described above, a transmembrane domain and a costimulatory domain and a second CAR that targets an antigen other than antigen targeted by the first CAR (e.g., an antigen expressed on the same cancer cell type as the first target) and includes an antigen binding domain, a transmembrane domain and a primary signaling domain. In another embodiment, the CAR expressing immune effector cell comprises a first CAR that includes an antigen binding domain that targets, e.g., a target described above, a transmembrane domain and a primary signaling domain and a second CAR that targets an antigen other than antigen targeted by the first CAR (e.g., an antigen expressed on the same cancer cell type as the first target) and includes an antigen binding domain to the antigen, a transmembrane domain and a costimulatory signaling domain.

[0815] In one embodiment, the CAR-expressing immune effector cell comprises a CAR described herein, e.g., a CAR to a target described above, and an inhibitory CAR. In one embodiment, the inhibitory CAR comprises an antigen binding domain that binds an antigen found on normal cells but not cancer cells, e.g., normal cells that also express the target. In one embodiment, the inhibitory CAR comprises the antigen binding domain, a transmembrane domain and an intracellular domain of an inhibitory molecule. For example, the intracellular domain of the inhibitory CAR can be an intracellular domain of PD1, PD-L1, CTLA-4, TIM-3, CEACAM (e.g., CEACAM-1, CEACAM-3 and/or CEACAM-5), LAG-3, VISTA, BTLA, TIGIT, LAIR1, CD160, 2B4 or TGF beta.

[0816] In one embodiment, an immune effector cell (e.g., T cell, NK cell) comprises a first CAR comprising an antigen binding domain that binds to a tumor antigen as described herein, and a second CAR comprising a PD1 extracellular domain or a fragment thereof.

[0817] In one embodiment, the cell further comprises an inhibitory molecule as described above. Non-limiting examples of inhibitory molecules include PD-1, PD-L1, PD-L2, CTLA4, TIM3, LAG3, CEACAM (e.g., CEACAM-1, CEACAM-3 and/or CEACAM-5), VISTA, BTLA, TIGIT, LAIR1, CD160, 2B4, CD80, CD86, B7-H3 (CD276), B7-H4 (VTCN1), HVEM (TNFRSF14 or CD107), KIR, A2aR, MHC class I, MHC class II, GAL9, adenosine, and TGF beta.

[0818] In one embodiment, the second CAR in the cell is an inhibitory CAR, wherein the inhibitory CAR comprises an antigen binding domain, a transmembrane domain, and an intracellular domain of an inhibitory molecule. The inhibitory molecule can be chosen from one or more of: PD1, PD-L1, CTLA-4, TIM-3, LAG-3, VISTA, BTLA, TIGIT, LAIR1, CD160, 2B4, TGF beta, CEACAM-1, CEACAM-3, and CEACAM-5. In one embodiment, the second CAR molecule comprises the extracellular domain of PD1 or a fragment thereof.

[0819] In embodiments, the second CAR molecule in the cell further comprises an intracellular signaling domain comprising a primary signaling domain and/or an intracellular signaling domain.

[0820] In other embodiments, the intracellular signaling domain in the cell comprises a primary signaling domain comprising the functional domain of CD3 zeta and a costimulatory signaling domain comprising the functional domain of 4-1BB.

[0821] In one embodiment, the second CAR molecule in the cell comprises the amino acid sequence of SEQ ID NO: 30.

[0822] In certain embodiments, the antigen binding domain of the first CAR molecule comprises a scFv and the antigen binding domain of the second CAR molecule does not comprise a scFv. For example, the antigen binding domain of the first CAR molecule comprises a scFv and the antigen binding domain of the second CAR molecule comprises a camelid VHH domain.

[0823] In other aspects and embodiments, a cell, e.g., a cell engineered to express a CAR, is also engineered to express a safety molecule, such as a molecule (or set of molecules) which mediates the depleting of the cells, e.g., CAR T cells, when appropriate (e.g., after the T cells have accomplished the anti-tumor function, or if the T cells are causing life-threatening side effects). In one exemplary aspect, the safety molecule is a molecule that does not affect the function of the cell, but which can be targeted by another agent, e.g., an antibody or ADC molecule targeting said molecule. One exemplary embodiment of such a molecule is a truncated receptor, e.g., a receptor comprising the extracellular domain and transmembrane domain of a receptor, but lacking all or a substantial portion of the intracellular domain of the receptor. An example is a truncated EGFR receptor, e.g., as described in WO2011/056894. Without being bound by theory, targeting said truncated EGFR receptor with an anti-EGFR antibody, e.g., cetuximab, will deplete cells expressing the truncated EGFR receptor. A second example is a iCasp9 switch polypeptide, e.g., a polypeptide having a dimerization domain, an optional linker, and a caspase domain oriented such that, when expressed in the presence of a dimerization compound in a mammalian host cell, the iCasp9 switch polypeptide homo-dimerizes, resulting in apoptosis of the host cell. In embodiments, the dimerization domain is a FKBP-based dimerization domain, e.g., the sequence harbors a mutation (F37V) which provides a complementary fitting cavity for AP1903 and AP1903-structurally related ligands (such as AP20187), which molecules may act as a dimerization compound. Such iCasp9 switch polypeptides (and associated dimerization compounds) are described in, for example, WO1997/031899, US2011/286980, WO2014/164348, WO2013/040371, US2013/071414, WO2014/255360, and N Engl J Med. 2011 Nov. 3; 365(18):1673-83. A third example of such a molecule is a molecule targeted by an anti-CD20 antibody, wherein, for example, administering an anti-CD20 antibody (e.g., rituximab) allows said cells to be depleted. Examples of molecules targeted by an anti-CD20 antibody include CD20, and truncated versions thereof (e.g., molecules comprising an extracellular domain recognizable by an anti-CD20 antibody, a transmembrane domain, and lacking at least a portion of an intracellular domain).

### Split CAR

[0824] In some embodiments, the CAR-expressing cell uses a split CAR. The split CAR approach is described in more detail in publications WO2014/055442 and WO2014/055657. Briefly, a split CAR system comprises a cell expressing a first CAR having a first antigen binding domain and a costimulatory domain (e.g., 41BB), and the cell also expresses a second CAR having a second antigen binding domain and an intracellular signaling domain (e.g., CD3 zeta). When the cell encounters the first antigen, the costimulatory domain is activated, and the cell proliferates. When the cell encounters the second antigen, the intracellular signaling domain is activated and cell-killing activity begins. Thus, the CAR-expressing cell is only fully activated in the presence of both antigens.

### Multiple CAR Expression

[0825] In one aspect, the CAR-expressing cell described herein can further comprise a second CAR (see, e.g., Additional Expressed Agents above), e.g., a second CAR that includes a different antigen binding domain, e.g., to the same target or a different target (e.g., a target other than a cancer associated antigen described herein or a different cancer associated antigen described herein).

[0826] In one embodiment, the second CAR includes an antigen binding domain to a target expressed by the same cancer cell type as the cancer associated antigen targeted by the first CAR. In one embodiment, the CAR-expressing cell comprises a first CAR that targets a first antigen and includes an intracellular signaling domain having a costimulatory signaling domain but not a primary signaling domain, and a second CAR that targets a second, different, antigen and includes an intracellular signaling domain having a primary signaling domain but not a costimulatory signaling domain. While not wishing to be bound by theory, placement of a costimulatory signaling domain, e.g., 4-1BB, CD28, CD27 or OX-40, onto the first CAR, and the primary signaling domain, e.g., CD3 zeta, on the second CAR can limit the CAR activity to cells where both targets are expressed. In one embodiment, the CAR expressing cell comprises a first cancer associated antigen CAR that includes an antigen binding domain that binds a target antigen described herein, a transmembrane domain and a costimulatory domain and a second CAR that targets a different target antigen (e.g., an antigen expressed on that same cancer cell type as the first target antigen) and includes an antigen binding domain, a transmembrane domain and a primary signaling domain. In another embodiment, the CAR expressing cell comprises a first CAR that includes an antigen binding domain that binds a target antigen described herein, a transmembrane domain and a primary signaling domain and a second CAR that targets an antigen other than the first target antigen (e.g., an antigen expressed on the same cancer cell type as the first target antigen) and includes an antigen binding domain to the antigen, a transmembrane domain and a costimulatory signaling domain.

[0827] In some embodiments, the CAR-expressing cell comprises a first and second CAR, wherein the antigen binding domain of one of said first CAR said second CAR does not comprise a variable light domain and a variable heavy domain. In some embodiments, the antigen binding domain of one of said first CAR said second CAR is an scFv, and the other is not an scFv. In some embodiments, the antigen binding domain of one of said first CAR said second CAR comprises a single VH domain. e.g., a camelid, shark, or lamprey single VH domain, or a single VH domain derived from a human or mouse sequence. In some embodiments, the antigen binding domain of one of said first CAR said second CAR comprises a nanobody. In some embodiments, the antigen binding domain of one of said first CAR said second CAR comprises a camelid VHH domain.

### MHC Expression

[0828] The CAR-expressing cell described herein comprises modifications in order to modulate the expression of a molecule that regulates MHC II expression (e.g., HLA-DM, HLA-DO, HLA-DR, HLA-DQ, HLA-DP, CIITA, RFXANK, RFXAP, RFX1, RFX5, NF-YA, NF-YB, NF-YC, X2BP, or OCAB), a component of the T cell system (e.g., TRAC, TRBC1, TRBC2, CD247, CD3, CD3D, CD3E, CD3G, DCK, CD52, FKBP1A, or NR3C1), and optionally a molecule that regulates the expression of MHC I (e.g. HLA-A, HLA-B, HLA-C, B2M, or NLRC5).

[0829] In some embodiments, the CAR-expressing cell is genetically engineered to modulate the expression of at least one molecule that regulates MHC II expression, e.g., HLA-DM, HLA-DO, HLA-DR, HLA-DQ, HLA-DP, CIITA, RFXANK, RFXAP, RFX1, RFX5, NF-YA, NF-YB, NF-YC, X2BP, and/or OCAB. In one aspect, the expression of said gene is reduced by at least about 50%, 60%, 70%, 80%, 90%, 95%, or 99% as compared to an unmodified cell. In some embodiments, the CAR-expressing cell is genetically engineered to reduce the expression of RFX1. In some embodiments, the CAR-expressing cell is genetically engineered to reduce the expression of RFX5. In some embodiments, the CAR-expressing cell is genetically engineered to reduce the expression of RFXANK. In some embodiments, the CAR-expressing cell is genetically engineered to reduce the expression of RFXAP. In some embodiments, the CAR-expressing cell is genetically engineered to reduce the expression of CIITA.

[0830] In some embodiments, the CAR-expressing cell is genetically engineered to modulate the expression of two or more molecules that regulate MHC II expression. In some embodiments, MHC II expression is modified by targeting CIITA and RFXAP. In some embodiments, MHC II expression is modified by targeting CIITA and RFX5. In some embodiments, MHC II expression is modified by targeting RFXAP and RFX5. In some embodiments, the CAR-expressing cell is genetically engineered to modulate the expression of three or more molecules that regulate MHC II expression. In some embodiments, the CAR-expressing cell is genetically engineered to modulate the expression of four or more molecules that regulate MHC II expression.

[0831] In some embodiments, the CAR-expressing cell is genetically engineered to modulate the expression of at least one molecule that regulates MHC I expression, e.g. HLA-A, HLA-B, HLA-C, B2M, and/or NLRC5. In one aspect, the expression of the gene is reduced by at least about 50%, 60%, 70%, 80%, 90%, 95%, or 99% as compared to an unmodified cell. In some embodiments, the CAR-expressing cell is genetically engineered to modulate, e.g., reduce, the expression of B2M.

[0832] In some embodiments, the CAR-expressing cell is genetically engineered to modulate the expression of two or more molecules that regulate MHC I expression. In some embodiments, the CAR-expressing cell is genetically engineered to modulate the expression of three or more molecules that regulate MHC I expression. In some embodiments, the CAR-expressing cell is genetically engineered to modulate the expression of four or more molecules that regulate MHC I expression.

[0833] In some embodiments, the CAR-expressing cell is genetically engineered to modulate the expression of at least one component of the T cell system, e.g. TRAC, TRBC1, TRBC2, CD247, CD3, CD3D, CD3E, CD3G, DCK, CD52, FKBP1A, and/or NR3C1. In one aspect, the expression of the gene is reduced by at least about 50%, 60%, 70%, 80%, 90%, 95%, or 99% as compared to an unmodified cell. In some embodiments, the CAR-expressing cell is genetically engineered to modulate, e.g., reduce, the expression of TRAC. In some embodiments, the CAR-expressing cell is genetically engineered to modulate, e.g., reduce, the expression of TRBC1. In some embodiments, the CAR-expressing cell is genetically engineered to modulate, e.g., reduce, the expression of CD3DEG. In some embodiments, the CAR-expressing cell is genetically engineered to modulate. e.g., reduce, the expression of TRBC2.

[0834] In some embodiments, the CAR-expressing cell is genetically engineered to modulate the expression of two or more components of the T cell system. In some embodiments, the CAR-expressing cell is genetically engineered to modulate the expression of three or more components of the T cell system. In some embodiments, the CAR-expressing cell is genetically engineered to modulate the expression of four or more components of the T cell system.

[0835] In one embodiment, the CAR-expressing cell is genetically engineered to reduce the expression of at least one molecule that regulates MHC II expression and at least one component of the T cell system. In one embodiment, the CAR-expressing cell is further genetically engineered to reduce the expression of at least one molecule that regulates MHC I expression.

[0836] In some embodiments, the CAR-expressing cell comprising at least one modification that affects the expression or transcription of a molecule that regulates MHC II expression, a component of the T cell system, and a molecule that regulates MHC I expression, as described herein. For example, the CAR-expressing cell further comprises modifications that modulate, e.g., reduce, the expression of TRAC, B2M, and CIITA.

### Telomerase Expression

[0837] While not wishing to be bound by any particular theory, in some embodiments, a therapeutic T cell has short term persistence in a patient, due to shortened telomeres in the T cell; accordingly, transfection with a telomerase gene can lengthen the telomeres of the T cell and improve persistence of the T cell in the patient. See Carl June, “Adoptive T cell therapy for cancer in the clinic”, Journal of Clinical Investigation, 117:1466-1476 (2007). Thus, in an embodiment, an immune effector cell, e.g., a T cell, as disclosed herein can further comprise an ectopically expressed telomerase subunit, e.g., the catalytic subunit of telomerase, e.g., TERT, e.g., hTERT. In some aspects, this disclosure provides a method of producing a CAR-expressing cell with longer persistence in a patient, comprising contacting a cell with a nucleic acid encoding a telomerase subunit, e.g., the catalytic subunit of telomerase, e.g., TERT, e.g., hTERT. The cell may be contacted with the nucleic acid before, simultaneous with, or after being contacted with a construct encoding a CAR.

[0838] In embodiments in which a cell is engineered to express more than one molecule, sequence encoding each of said molecules (e.g., sequence encoding a CAR and sequence encoding an NK inhibitory molecule) can be disposed on the same nucleic acid molecule (e.g., same template nucleic acid), e.g., the same plasmid or vector, e.g., viral vector, e.g., lentiviral vector. In an embodiment, (i) sequence encoding a CAR, as described herein, and (ii) sequence encoding an NK inhibitory molecule, as described herein, can be present on the same nucleic acid, e.g., vector. Production of the corresponding proteins can be achieved, e.g., by the use of separate promoters, or by the use of a bicistronic transcription product (which can result in the production of two proteins by cleavage of a single translation product or by the translation of two separate protein products). In an embodiment, a sequence encoding a cleavable peptide, e.g., a P2A, T2A or F2A sequence, is disposed between (i) and (ii). In an embodiment, a sequence encoding an IRES, e.g., an EMCV or EV71 IRES, is disposed between (i) and (ii). In these embodiments, (i) and (ii) are transcribed as a single RNA. In other aspects, each molecule may be expressed from a different promoter. In an embodiment, a first promoter is operably linked to (i) and a second promoter is operably linked to (ii), such that (i) and (ii) are transcribed as separate mRNAs.

[0839] Alternatively, the sequence encoding the more than one molecules can be disposed on the different nucleic acid molecules (e.g., different template nucleic acid molecules), e.g., different plasmids or vectors, e.g., viral vector, e.g., lentiviral vector. E.g., the (i) sequence encoding a CAR as described herein can be present on a first nucleic acid, e.g., a first vector, and the (ii) sequence encoding a NK inhibitory molecule can be present on the second nucleic acid, e.g., the second vector. In various embodiments, the sequences below may be used.

TABLE HH
Exemplary sequences of various components of CAR (aa - amino acids,
na - nucleicacids that encodes the corresponding protein)

| SEQ | | |
|---|---|---|
| ID | | |
| NO | description | Sequence |
| 1 | EF-1 | CGTGAGGCTCCGGTGCCCGTCAGTGGGCAGAGCGCACATCGCCCACA |
| | promoter | GTCCCCGAGAAGTTGGGGGGAGGGGTCGGCAATTGAACCGGTGCCTA |
| | | GAGAAGGTGGCGCGGGGTAAACTGGGAAAGTGATGTCGTGTACTGG |
| | | CTCCGCCTTTTTCCCGAGGGTGGGGGAGAACCGTATATAAGTGCAGT |
| | | AGTCGCCGTGAACGTTCTTTTTCGCAACGGGTTTGCCGCCAGAACACA |
| | | GGTAAGTGCCGTGTGTGGTTCCCGCGGGCCTGGCCTCTTTACGGGTTA |
| | | TGGCCCTTGCGTGCCTTGAATTACTTCCACCTGGCTGCAGTACGTGAT |
| | | TCTTGATCCCGAGCTTCGGGTTGGAAGTGGGTGGGAGAGTTCGAGGC |
| | | CTTGCGCTTAAGGAGCCCCTTCGCCTCGTGCTTGAGTTGAGGCCTGGC |
| | | CTGGGCGCTGGGGCCGCCGCGTGCGAATCTGGTGGCACCTTCGCGCC |
| | | TGTCTCGCTGCTTTCGATAAGTCTCTAGCCATTTAAAATTTTTGATGA |
| | | CCTGCTGCGACGCTTTTTTTCTGGCAAGATAGTCTTGTAAATGCGGGC |
| | | CAAGATCTGCACACTGGTATTTCGGTTTTTGGGGCCGCGGGCGGCGA |
| | | CGGGGCCCGTGCGTCCCAGCGCACATGTTCGGCGAGGCGGGGCCTGC |
| | | GAGCGCGGCCACCGAGAATCGGACGGGGGTAGTCTCAAGCTGGCCG |
| | | GCCTGCTCTGGTGCCTGGCCTCGCGCCGCCGTGTATCGCCCCGCCCTG |
| | | GGCGGCAAGGCTGGCCCGGTCGGCACCAGTTGCGTGAGCGGAAAGA |
| | | TGGCCGCTTCCCGGCCCTGCTGCAGGGAGCTCAAAATGGAGGACGCG |
| | | GCGCTCGGGAGAGCGGGCGGGTGAGTCACCCACACAAAGGAAAAGG |
| | | GCCTTTCCGTCCTCAGCCGTCGCTTCATGTGACTCCACGGAGTACCGG |
| | | GCGCCGTCCAGGCACCTCGATTAGTTCTCGAGCTTTTGGAGTACGTCG |
| | | TCTTTAGGTTGGGGGGAGGGGTTTTATGCGATGGAGTTTCCCCACACT |
| | | GAGTGGGTGGAGACTGAAGTTAGGCCAGCTTGGCACTTGATCTTAATT |
| | | CTCCTTGGAATTTGCCCTTTTTGAGTTTGGATCTTGGTTCATTCTCAAG |
| | | CCTCAGACAGTTGGTTCAAAGTTTTTTTCTTCCATTTCAGGTGTCGTGA |
| 2 | Leader (aa) | MALPVTALLLPLALLLHAARP |
| 3 | Leader (na) | ATGGCCCTGCCTGTGACAGCCCTGCTGCTGCCTCTGGCTCTGCTGCTG |
| | | CATGCCGCTAGACCC |
| 4 | Leader (na) | ATGGCCCTCCCTGTCACCGCCCTGCTGCTTCCGCTGGCTCTTCTGCTCC |
| | | ACGCCGCTCGGCCC |
| 5 | CD8 hinge | TTTPAPRPPTPAPTIASQPLSLRPEACRPAAGGAVHTRGLDFACD |
| | (aa) | |
| 6 | CD8 hinge | ACCACGACGCCAGCGCCGCGACCACCAACACCGGCGCCCACCATCGC |
| | (na) | GTCGCAGCCCCTGTCCCTGCGCCCAGAGGCGTGCCGGCCAGCGGCGG |
| | | GGGGCGCAGTGCACACGAGGGGGCTGGACTTCGCCTGTGAT |
| 7 | Ig4 hinge | ESKYGPPCPPCPAPEFLGGPSVFLFPPKPKDTLMISRTPEVTCVVVDVSQE |
| | (aa) | DPEVQFNWYVDGVEVHNAKTKPREEQFNSTYRVVSVLTVLHQDWLNG |
| | | KEYKCKVSNKGLPSSIEKTISKAKGQPREPQVYTLPPSQEEMTKNQVSLT |
| | | CLVKGFYPSDIAVEWESNGQPENNYKTTPPVLDSDGSFFLYSRLTVDKSR |
| | | WQEGNVFSCSVMHEALHNHYTQKSLSLSLGKM |
| 8 | Ig4 hinge | GAGAGCAAGTACGGCCCTCCCTGCCCCCCTTGCCCTGCCCCCGAGTTC |
| | (na) | CTGGGCGGACCCAGCGTGTTCCTGTTCCCCCCCAAGCCCAAGGACAC |
| | | CCTGATGATCAGCCGGACCCCCGAGGTGACCTGTGTGGTGGTGGACG |
| | | TGTCCCAGGAGGACCCCGAGGTCCAGTTCAACTGGTACGTGGACGGC |
| | | GTGGAGGTGCACAACGCCAAGACCAAGCCCCGGGAGGAGCAGTTCA |
| | | ATAGCACCTACCGGGTGGTGTCCGTGCTGACCGTGCTGCACCAGGAC |
| | | TGGCTGAACGGCAAGGAATACAAGTGTAAGGTGTCCAACAAGGGCCT |
| | | GCCCAGCAGCATCGAGAAAACCATCAGCAAGGCCAAGGGCCAGCCT |
| | | CGGGAGCCCCAGGTGTACACCCTGCCCCCTAGCCAAGAGGAGATGAC |
| | | CAAGAACCAGGTGTCCCTGACCTGCCTGGTGAAGGGCTTCTACCCCA |
| | | GCGACATCGCCGTGGAGTGGGAGAGCAACGGCCAGCCCGAGAACAA |
| | | CTACAAGACCACCCCCCCTGTGCTGGACAGCGACGGCAGCTTCTTCCT |
| | | GTACAGCCGGCTGACCGTGGACAAGAGCCGGTGGCAGGAGGGCAAC |
| | | GTCTTTAGCTGCTCCGTGATGCACGAGGCCCTGCACAACCACTACACC |
| | | CAGAAGAGCCTGAGCCTGTCCCTGGGCAAGATG |
| 9 | IgD hinge | RWPESPKAQASSVPTAQPQAEGSLAKATTAPATTRNTGRGGEEKKKEKE |
| | (aa) | KEEQEERETKTPECPSHTQPLGVYLLTPAVQDLWLRDKATFTCFVVGSD |
| | | LKDAHLTWEVAGKVPTGGVEEGLLERHSNGSQSQHSRLTLPRSLWNAG |
| | | TSVTCTLNHPSLPPQRLMALREPAAQAPVKLSLNLLASSDPPEAASWLLC |
| | | EVSGFSPPNILLMWLEDQREVNTSGFAPARPPPQPGSTTFWAWSVLRVP |
| | | APPSPQPATYTCVVSHEDSRTLINASRSLEVSYVTDH |
| 10 | IgD hinge | AGGTGGCCCGAAAGTCCCAAGGCCCAGGCATCTAGTGTTCCTACTGC |
| | (na) | ACAGCCCCAGGCAGAAGGCAGCCTAGCCAAAGCTACTACTGCACCTG |
| | | CCACTACGCGCAATACTGGCCGTGGCGGGGAGGAGAAGAAAAAGGA |
| | | GAAAGAGAAAGAAGAACAGGAAGAGAGGGAGACCAAGACCCCTGA |
| | | ATGTCCATCCCATACCCAGCCGCTGGGCGTCTATCTCTTGACTCCCGC |
| | | AGTACAGGACTTGTGGCTTAGAGATAAGGCCACCTTTACATGTTTCGT |
| | | CGTGGGCTCTGACCTGAAGGATGCCCATTTGACTTGGGAGGTTGCCG |
| | | GAAAGGTACCCACAGGGGGGGTTGAGGAAGGGTTGCTGGAGCGCCA |
| | | TTCAATGGCTCTCAGAGCCAGCACTCAAGACTCACCCTTCCGAGATC |
| | | CCTGTGGAACGCCGGGACCTCTGTCACATGTACTCTAAATCATCCTAG |
| | | CCTGCCCCCACAGCGTCTGATGGCCCTTAGAGAGCCAGCCGCCCAGG |
| | | CACCAGTTAAGCTTAGCCTGAATCTGCTCGCCAGTAGTGATCCCCCAG |
| | | AGGCCGCCAGCTGGCTCTTATGCGAAGTGTCCGGCTTTAGCCCGCCC |
| | | AACATCTTGCTCATGTGGCTGGAGGACCAGCGAGAAGTGAACACCAG |
| | | CGGCTTCGCTCCAGCCCGGCCCCCACCCCAGCCGGGTTCTACCACATT |
| | | CTGGGCCTGGAGTGTCTTAAGGGTCCCAGCACCACCTAGCCCCCAGC |
| | | CAGCCACATACACCTGTGTTGTGTCCCATGAAGATAGCAGGACCCTG |
| | | CTAAATGCTTCTAGGAGTCTGGAGGTTTCCTACGTGACTGACCATT |
| 11 | GS | GGGGSGGGGS |
| | hinge/linker | |
| | (aa) | |
| 12 | GS | GGTGGCGGAGGTTCTGGAGGTGGAGGTTCC |
| | hinge/linker | |
| | (na) | |
| 13 | CD8TM (aa) | IYIWAPLAGTCGVLLLSLVITLYC |
| 14 | CD8 TM | ATCTACATCTGGGCGCCCTTGGCCGGGACTTGTGGGGTCCTTCTCCTG |
| | (na) | TCACTGGTTATCACCCTTTACTGC |
| 15 | CD8 TM | ATCTACATTFGGGCCCCTCTGGCTGGTACTTGCGGGGTCCTGCTGCTT |
| | (na) | TCACTCGTGATCACTCTTTACTGT |
| 16 | 4-1BB | KRGRKKLLYIFKQPFMRPVQTTQEEDGCSCRFPEEEEGGCEL |
| | intracellular | |
| | domain (aa) | |
| 17 | 4-1BB | AAACGGGGCAGAAAGAAACTCCTGTATATATTCAAACAACCATTTAT |
| | intracellular | GAGACCAGTACAAACTACTCAAGAGGAAGATGGCTGTAGCTGCCGAT |
| | domain (na) | TTCCAGAAGAAGAAGAAGGAGGATGTGAACTG |
| 18 | 4-1BB | AAGCGCGGTCGGAAGAAGCTGCTGTACATCTTTAAGCAACCCTTCAT |
| | intracellular | GAGGCCTGTGCAGACTACTCAAGAGGAGGACGGCTGTTCATGCCGGT |
| | domain (na) | TCCCAGAGGAGGAGGAAGGCGGCTGCGAACTG |
| 19 | CD27 (aa) | QRRKYRSNKGESPVEPAEPCRYSCPREEEGSTIPIQEDYRKPEPACSP |
| 20 | CD27 (na) | AGGAGTAAGAGGAGCAGGCTCCTGCACAGTGACTACATGAACATGA |
| | | CTCCCCGCCGCCCCGGGCCCACCCGCAAGCATTACCAGCCCTATGCC |
| | | CCACCACGCGACTTCGCAGCCTATCGCTCC |
| 21 | CD3-zeta | RVKFSRSADAPAYKQGQNQLYNELNLGRREEYDVLDKRRGRDPEMGG |
| | (aa) | KPRRKNPQEGLYNELQKDKMAEAYSEIGMKGERRRGKGHDGLYQGLST |
| | | ATKDTYDALHMQALPPR |
| 22 | CD3-zeta | AGAGTGAAGTTCAGCAGGAGCGCAGACGCCCCCGCGTACAAGCAGG |
| | (na) | GCCAGAACCAGCTCTATAACGAGCTCAATCTAGGACGAAGAGAGGA |
| | | GTACGATGTTTTGGACAAGAGACGTGGCCGGGACCCTGAGATGGGGG |
| | | GAAAGCCGAGAAGGAAGAACCCTCAGGAAGGCCTGTACAATGAACT |
| | | GCAGAAAGATAAGATGGCGGAGGCCTACAGTGAGATTGGGATGAAA |
| | | GGCGAGCGCCGGAGGGGCAAGGGGCACGATGGCCTTTACCAGGGTC |
| | | TCAGTACAGCCACCAAGGACACCTACGACGCCCTTCACATGCAGGCC |
| | | CTGCCCCCTCGC |
| 23 | CD3-zeta | CGCGTGAAATTCAGCCGCAGCGCAGATGCTCCAGCCTACAAGCAGGG |
| | (na) | GCAGAACCAGCTCTACAACGAACTCAATCTTGGTCGGAGAGAGGAGT |
| | | ACGACGTGCTGGACAAGCGGAGAGGACGGGACCCAGAAATGGGCGG |
| | | GAAGCCGCGCAGAAAGAATCCCCAAGAGGGCCTGTACAACGAGCTC |
| | | CAAAAGGATAAGATGGCAGAAGCCTATAGCGAGATTGGTATGAAAG |
| | | GGGAACGCAGAAGAGGCAAAGGCCACGACGGACTGTACCAGGGACT |
| | | CAGCACCGCCACCAAGGACACCTATGACGCTCTTCACATGCAGGCCC |
| | | TGCCGCCTCGG |
| 24 | CD3-zeta | RVKFSRSADAPAYQQGQNQLYNELNLGRREEYDVLDKRRGRDPEMGG |
| | (aa) | KPRRKNPQEGLYNELQKDKMAEAYSEIGMKGERRRGKGHDGLYQGLST |
| | | ATKDTYDALHMQALPPR |
| 25 | CD3-zeta | AGAGTGAAGTTCAGCAGGAGCGCAGACGCCCCCGCGTACCAGCAGG |
| | (na) | GCCAG |
| | | AACCAGCTCTATAACGAGCTCAATCTAGGACGAAGAGAGGAGTACG |
| | | ATGTTT |
| | | TGGACAAGAGACGTGGCCGGGACCCTGAGATGGGGGGAAAGCCGAG |
| | | AAGGA |
| | | AGAACCCTCAGGAAGGCCTGTACAATGAACTGCAGAAAGATAAGAT |
| | | GGCGG |
| | | AGGCCTACAGTGAGATTGGGATGAAAGGCGAGCGCCGACGGGCAA |
| | | GGGGC |
| | | ACGATGGCCTTTACCAGGGTCTCAGTACAGCCACCAAGGACACCTAC |
| | | GACGC |
| | | CCTTCACATGCAGGCCCTGCCCCCTCGC |
| 26 | linker | GGGGS |
| 28 | PD-I | PGWFLDSPDRPWNPPTFSPALLVVTEGDNATFTCSFSNTSESFVLNWYR |
| | extracellular | MSPSNQTDKLAAFPEDRSQPGQDCRFRVTQLPNCIRDFHMSVRARRND |
| | domain (aa) | SGTYLCGAISLAPKAQIKESLRAELRVTERRAEVPTAHPSPSPRPAGQFQT |
| | | LV |
| 29 | PD-I | CCCGGATGGTTTCTGGACTCTCCGGATCGCCCGTGGAATCCCCCAACC |
| | extracellular | TTCTCACCGGCACTCTTGGTTGTGACTGAGGGCGATAATGCGACCTTC |
| | domain (na) | ACGTGCTCGTTCTCCAACACCTCCGAATCATTCGTGCTGAACTGGTAC |
| | | CGCATGAGCCCGTCAAACCAGACCGACAAGCTCGCCGCGTTTCCGGA |
| | | AGATCGGTCGCAACCGGGACAGGATTGTCGGTTCCGCGTGACTCAAC |
| | | TGCCGAATGGCAGAGACTTCCACATGAGCGTGGTCCGCGCTAGGCGA |
| | | AACGACTCCGGGACCTACCTGTGCGGAGGCATCTCGCTGGCGCCTAA |
| | | GGCCCAAATCAAAGAGAGCTTGAGGGCCGAACTGAGAGTGACCGAG |
| | | CGCAGAGCTGAGGTGCCAACTGCACATCCATCCCCATCGCCTCGGCC |
| | | TGCGGGGCAGTTTCAGACCCTGGTC |
| 30 | PD-1 CAR | MALPVTALLLPLALLLHAARPPGWFLDSPDRPWNPPTFSPALINVTEGD |
| | (aa) with | NATFTCSFSNTSESFVLNWYRMSPSNQTDKLAAFPEDRSQPGQDCRFRV |
| | sinal | TQLPNGRDFHMSVVRARRNDSGTYLCGAISLAPKAQIKESLRAELRVTE |
| | | RRAEVPTAHPSPSPRPAGQFQTLVTTTPAPRPPTPAPTIASQPLSLRPEACR |
| | | PAAGGAVHTRGLDFACDIYIWAPLAGTCGVLLLSLVITLYCKRGRKKLL |
| | | YIFKQPFMRPVQTTQEEDGCSCRFPEEEEGGCELRVKFSRSADAPAYKQG |
| | | QNQLYNELNLGRREEYDVLDKRRGRDPEMGGKPRRKNPQEGLYNELQ |
| | | KDKMAEAYSEIGMKGERRRGKGHDGLYQGLSTATKDTYDALHMQALP |
| | | PR |
| 31 | PD-1 CAR | ATGGCCCTCCCTGTCACTGCCCTGCTTCTCCCGCTCGCACTCCTGCTCC |
| | (na) | ACGCCGCTAGACCACCCGGATGGTTTCTGGACTCTCCGGATCGCCCGT |
| | | GGAATCCCCCAACCTTCTCACCGGCACYCTTGGTTGTGACTGAGGGCG |
| | | ATAATGCGACCTTCACGTGCTCGTTCTCCAACACCTCCGAATCATTCG |
| | | TGCTGAACTGGTACCGCATGAGCCCGTCAAACCAGACCGACAAGCTC |
| | | GCCGCGTTTCCGGAAGATCGGTCGCAACCGGGACAGGATTGTCGGTT |
| | | CCGCGTGACTCAACTGCCGAATGGCAGAGACTTCCACATGAGCGTGG |
| | | TCCGCGCTAGGCGAAACGACTCCGGGACCTACCTGTGCGGAGCCATC |
| | | TCGCTGGCGCCTAAGGCCCAAATCAAAGAGAGCTTGAGGGCCGAACT |
| | | GAGAGTGACCGAGCGCAGAGCTGAGGTGCCAACTGCACATCCATCCC |
| | | CATCGCCTCGGCCTGCGGGGCAGTTTCAGACCCTGGTCACGACCACT |
| | | CCGGCGCCGCGCCCACCGACTCCGGCCCCAACTATCGCGAGCCAGCC |
| | | CCTGTCGCTGAGGCCGGAAGCATGCCGCCCTGCCGCCGGAGGTGCTG |
| | | TGCATACCCGGGGATTGGACTTCGCATGCGACATCTACATTTGGGCTC |
| | | CTCTCGCCGGAACTTGTGGCGTGCTCCTTCTGTCCCTGGTCATCACCC |
| | | TGTACTGCAAGCGGGGTCGGAAAAAGCTTCTGTACATTTTCAAGCAG |
| | | CCCTTCATGAGGCCCGTGCAAACCACCCAGGAGGAGGACGGTTGCTC |
| | | CTGCCGGTTCCCCGAAGAGGAAGAAGGAGGTTGCGAGCTGCGCGTGA |
| | | AGTTCTCCCGGAGCGCCGACGCCCCCGCCTATAAGCAGGGCCAGAAC |
| | | CAGCTGTACAACGAACTGAACCTGGGACCTGCGGGAAGAGTACGATG |
| | | TGCTGGACAAGCGGCGCGGCCGGGACCCCGAAATGGGCGGGAAGCC |
| | | TAGAAGAAAGAACCCTCAGGAAGGCCTGTATAACGAGCTGCAGAAG |
| | | GACAAGATGGCCGAGGCCTACTCCGAAATTGGGATGAAGGGAGAGC |
| | | GGCGGAGGGGAAAGGGGCACGACGGCCTGTACCAAGGACTGTCCAC |
| | | CGCCACCAAGGACACATACGATGCCCTGCACATGCAGGCCCTTCCCC |
| | | CTCGC |
| 32 | linker | (Gly-Gly-Gly-Ser)n, where n = 1 − 10 |
| 33 | linker | (Gly-Gly-Gly-Gly-Ser)n, where n = 1 − 10 |
| 34 | linker | (Gly4 Ser)4 |
| 35 | linker | (Gly4 Ser)3 |
| 36 | linker | (Gly3 Ser) |
| 37 | PD1 CAR | PGWFLDSPDRPWNPPTFSPALLVVTEGDNATFTCSFSNTSESFVLNWYR |
| | (an) | MSPSNQTDKLAAFPEDRSQPGQDCRFRVTQLPNGRDFTHMSVVRARRND |
| | | SGTYLCGAISLAPKAQIKESLRAELRVTERRAEVPTAHPSPSPRPAGQFQT |
| | | LVTTTPAPRPPTPAPTIASQPLSLRPEACRPAAGGAVHTRGLDFACDIYIW |
| | | APLAGTCGVLLLSLVITLYCKRGRKKLLYIFKQPFMRPVQTTQEEDGCSC |
| | | RFPEEEEGGCELRVKFSRSADAPAYKQGQNQLYNELNLGRREEYDVLD |
| | | KRRGRDPEMGGKPRRKNPQEGLYNELQKDKMAEAYSEIGMKGERRRG |
| | | KGHDGLYQGSTATKDTYDALHMQALPPR |
| 38 | linker | GSTSGSGKPGSGEGSTKG |

### V. Cells

[0840] In various embodiments, provided herein are cells, e.g., T or NK cells, e.g., autologous or allogeneic T cells. In some embodiments, the cell expresses at least one CAR as described herein. In some embodiments, the at least one CAR is CD22. In some embodiments, the at least one CAR is BCMA. In some embodiments, the at least one CAR is CD19. In some embodiments, the at least one CAR is CD20. Also provided herein, in certain embodiments, are cells comprising CARs that exhibit bispecific activation and/or targeting capacity. In these embodiments, the antigen binding member can comprise a plurality, e.g., 2, 3, 4, or 5 antigen binding domains, e.g., scFvs, wherein each antigen binding domain binds to a target antigen, e.g. different antigens or the same antigen, e.g., the same or different epitopes on the same antigen. In some embodiments, the CAR is a combination of two or more antigen binding domains, e.g., selected from CD19, CD20, CD22, and BCMA. In some embodiments, the combination comprises CD19 and CD22. In some embodiments, the multiple antigen binding regions, e.g., the CD19 and CD22 antigen binding regions, are scFv constructs (e.g., those disclosed in WO2018067992) optionally joined by one or more linkers. In some embodiments, the antigen binding domains are in tandem. In some embodiments, a linker or hinge region is disposed between each of the antigen binding domains. Suitable linkers and hinge regions are described, e.g., in WO2018067992, which is incorporated herein by reference. In some embodiments, two separate CAR are expressed in the cell (e.g., dual expression of separately encoded CARs).

[0841] In some embodiments, a CAR is encoded and expressed from a genomic insertion at or near a target molecule that regulates the expression of MHC II (e.g., HLA-DM, HLA-DO, HLA-DR, HLA-DQ, HLA-DP, CIITA, RFXANK, RFXAP, RFX1, RFX5, NF-YA, NF-YB, NF-YC, X2BP, or OCAB), and at or near a second target component of the T cell system (e.g., TRAC, TRBC1, TRBC2, CD247, CD3, CD3D, CD3E, CD3G, DCK, CD52, FKBP1A, or NR3C) in the cell. In some embodiments, a further CAR is encoded and expressed from a genomic insertion at or near a target molecule that regulates the expression of MHC I, e.g., HLA-A, HLA-B, HLA-C, B2M, or NLRC5. In some embodiments, the cell is generated using a CRISPR system as described herein. Other methods for generating said cells may also be used.

[0842] In one embodiment, the disclosure provides for cells comprising a gene editing system, e.g., a CRISPR system, described herein. In an aspect, the disclosure provides for cells modified by a gene editing system, e.g., a CRISPR system, described herein.

[0843] In another aspect, the disclosure provides cells which comprise, or which at any time comprised, a gRNA molecule, e.g., one or more gRNA molecules, as described herein, or a CRISPR system as described herein. In an embodiment, the cell has been altered, e.g., the target sequence targeted by the gRNA molecule has been altered, e.g., to create an indel, by introduction of a gRNA molecule as described herein (or nucleic acid encoding said gRNA molecule), or a CRISPR system (or nucleic acid encoding one or more components of said CRISPR system) as described herein, e.g., altered by a method described herein. In an embodiment, the alteration results in a change in transcription or translation of the functional (e.g., wild type) gene product of the gene comprising the target site. In an embodiment, the alteration results in reduced or no expression of the functional (e.g., wild type) gene product of the gene comprising the target site. In embodiments, the alteration is insertion of heterologous nucleic acid sequence, e.g., from a template nucleic acid (e.g., as described herein), e.g., sequence encoding a CAR (e.g., as described herein). In embodiments, the alteration results in reduced or no expression of the functional (e.g., wild type) gene product of the gene comprising the target site and insertion of heterologous nucleic acid sequence, e.g., from a template nucleic acid at the same target site. In embodiments, the alteration results in reduced or no expression of the functional (e.g., wild type) gene product of the gene comprising the target site and insertion of heterologous nucleic acid sequence, e.g., from a template nucleic acid at a different target site.

[0844] In one aspect, the cell is an animal cell. In embodiments, the cell is a mammalian, primate, or human cell. In embodiments, the cell is a human cell. In embodiments, the cell is an immune effector cell (e.g., a population of immune effector cells), for example a T cell or NK cell. In embodiments, the T cell (e.g., population of T cells) is or comprises a CD4+ T cell, a CD8+ T cell, or a combination thereof. In embodiments, the cell is autologous. In embodiments, the cell is allogeneic.

[0845] In a preferred embodiment the cell (or the population of cells) has been, or will be, engineered to express a chimeric antigen receptor (CAR), e.g., a CAR as described in Section IV. In embodiments, the cell is engineered to express a BCMA CAR, e.g., as described herein. In embodiments, the CAR-engineered cell is allogeneic. In embodiments, the CAR-engineered cell is autologous. In embodiments, the sequence encoding the CAR is stably integrated into the genome of the cell within a first sequence of a molecule that regulates the expression of MHC II, and a second sequence of a component of the T cell system, and optionally a third sequence of a molecule that regulates the expression of MHC I, e.g., at or near a target sequence of a gRNA molecule described herein. In embodiments, the nucleic acid sequence integrated into said site does not comprise sequence of a lentivirus vector (e.g., does not comprise a cPPT or CPT element).

[0846] In another aspect, the disclosure provides cells, such as those described above, which include, has at any time included, or will include a further gRNA molecule as described herein, e.g., a further gRNA molecule with a targeting domain different from that of the first, second, and optional third gRNA molecule. In embodiments, at least two gRNA molecules are complementary to sites within the same target, e.g., a molecule that regulates the expression of MHC II, e.g., RFXAP. In other embodiments, the at least two gRNA molecules are complementary to target sequences in different genes or loci. In embodiments, at least one of said gRNA molecules comprises a targeting domain complementary to a first sequence of a molecule that regulates the expression of MHC II, and a second sequence of a component of the T cell system, and optionally a third sequence of a molecule that regulates the expression of MHC I sequence, e.g., as described herein. In embodiments, the further gRNA molecule(s) target sequences within an inhibitory molecule gene (e.g., PDCD1).

[0847] It will be understood that in any of the disclosed aspects and embodiments in which a plurality of sites are targeted, that for any or all of the different gene (or molecular complex) targets, two or more gRNAs may be employed with respect to one or more of said different genes or different molecular complexes.

[0848] When gRNA molecules targeting more than one gene are employed, they may be employed for different means. For example, one may utilize a gRNA molecule to a molecule that regulates the expression of MHC II, e.g., RFXAP, in conjunction with a template nucleic acid to insert heterologous nucleic acid sequence at or near the target sequence of the molecule that regulates the expression of MHC II, e.g., RFXAP. At the same time, one may further utilize one or more additional gRNA molecules to one or more additional targets, e.g., to a component of the T cell receptor (e.g., TRAC), B2M and/or CIITA, to reduce or eliminate expression and/or function of said one or more genes. These additional gRNA molecules may be utilized at the same time, subsequently, or prior to the first gRNA molecule.

[0849] In some embodiments, the two or more, e.g. two, gRNA molecules are complementary to target sites within different genes. Such cells may comprise alterations, e.g., indels, at or near each target site such that expression of the functional gene product of more than one gene is reduced or eliminated. As discussed above, in such embodiments, more than one gRNA molecule targeted to each of the different genes may be employed.

[0850] In embodiments, the cell comprises, has comprised or will comprise a first gRNA molecule comprising a targeting domain complementary with a target sequence of a molecule that regulates the expression of MHC II (e.g., a targeting domain described in Tables 1a-c). The cell may further comprise, or at any time has comprised or will comprise, a second gRNA molecule comprising a targeting domain complementary with a target sequence of a component of the T cell system. The cell may also comprise, or at any time has comprised or will comprise, a third gRNA molecule comprising a targeting domain complementary with a target sequence of a molecule that regulates the expression of MHC I. The cell may also comprise, or at any time has comprised or will comprise, a fourth gRNA molecule comprising a targeting domain complementary with a target sequence of an inhibitory molecule (e.g., PDCD1). In embodiments the cell comprises heterologous nucleic acid sequence, e.g., sequence encoding a CAR, e.g., as described herein, which, in embodiments, is integrated into the genome of the cell at or near a site targeted by at least one of gRNA molecule, and optionally, has reduced or eliminated expression of one or more genes, e.g., one or more genes targeted by the first, second, third, and/or fourth gRNA molecules.

[0851] In embodiments, a cell, e.g., a CAR-expressing cell as described herein, may comprise one or more modifications (e.g., heterologous nucleic acid sequence insertion, or nucleotide insertions or deletions) to an endogenous gene encoding a molecule that regulates the expression of MHC II; one or more modifications (e.g., nucleotide insertions or deletions) to an endogenous gene encoding a component of the T cell receptor (e.g., TRAC or TRBC); one or more modifications (e.g., nucleotide insertions or deletions) to an endogenous gene encoding a molecule that regulates the expression of MHC I, e.g., B2M; and/or one or more modifications (e.g., nucleotide insertions or deletions) to an endogenous inhibitory molecule (e.g., PDCD1) gene. In embodiments, one or more of said modifications reduce or eliminate expression of said gene. In embodiments, the disclosure provides a cell, e.g., a CAR-expressing cell, e.g., as described herein, with a modification to a first sequence of a molecule that regulates the expression of MHC II, and a second sequence of a component of the T cell system, and optionally a third sequence of a molecule that regulates the expression of MHC I, that is further TCR—(e.g., has a level of expression of TCR greater than 50%, 60%, 70%, 80%, 90%, 95%, 96%, 97%, 98%, or 99% lower than that of an unmodified cell of the same type, as detected by FACS. e.g., FACS using an anti-CD3 antibody), B2M—(e.g., has a level of expression of B2M and/or one or more MHC class I proteins greater than 50%, 60%, 70%, 80%, 90%, 95%, 96%, 97%, 98%, or 99% lower than that of an unmodified cell of the same type, as detected by FACS, e.g., FACS using an anti-B2M antibody) and/or CIITA (e.g., has a level of expression of CIITA and/or a molecule that regulates MHC I protein expression greater than 50%, 60%, 70%, 80%, 90%, 95%, 96%, 97%, 98%, or 99% lower than that of an unmodified cell of the same type, as detected by FACS, e.g., FACS using an anti-CIITA antibody). In an embodiment, the cell is engineered to express a CAR molecule. e.g., as described herein. In embodiments, the CAR is a CD19 CAR, e.g., as described herein. In other embodiments, the CAR is a BCMA CAR, e.g., as described herein. In other embodiments, the CAR is a CD123 CAR, e.g., as described herein.

[0852] In an aspect, a cell disclosed herein comprises (or a population of cells comprises one or more cells which comprise):
[0853] (a) Nucleic acid sequence encoding a CAR, e.g., a template nucleic acid comprising sequence encoding a CAR, e.g., as described herein, e.g., wherein said nucleic acid sequence encoding the CAR is (or becomes) integrated into the genome at a site at or near the target sequence of a first target-, i.e., a molecule that regulates the expression of MHC II and a second target-, i.e., a component of the T cell system, and optionally a third target-, i.e., a molecule that regulates the expression of MHC I targeting gRNA molecule described herein (e.g., a gRNA molecule comprising a targeting domain of Tables 1a-c);

[0854] Wherein the cell (or population of cells comprises one or more cells which) expresses the CAR. In embodiments, the nucleic acid sequence encoding the CAR is integrated in only one allele of the target sequence. In embodiments, one or more functions of a molecule that regulates the expression of MHC I, a component of the T cell system, and optionally a molecule that regulates the expression of MHC I is reduced or eliminated in said cell. In embodiments, one or more functions of a molecule that regulates the expression of MHC II, a component of the T cell system, and optionally a molecule that regulates the expression of MHC I is reduced, e.g., reduced by 10%, 20%, 30%, 40%, 50%, 60% or more, but not eliminated.

[0855] In an aspect, a cell comprises (e.g., a population of cells comprises one or more cells which comprise):
[0856] (b) Nucleic acid sequence encoding a CAR, e.g., a template nucleic acid comprising sequence encoding a CAR, e.g., as described herein, e.g., wherein said nucleic acid sequence encoding the CAR is (or becomes) integrated into the genome at a site at or near a first target, i.e., a molecule that regulates the expression of MHC II, and a second target, i.e., a component of the T cell system, and optionally a third target, i.e., a molecule that regulates the expression of MHC I, gRNA molecule described herein (e.g., a gRNA molecule comprising a targeting domain of Tables 1a-c);
[0857] (c) An indel at or near a sequence of a gene encoding a component of a TCR (e.g., TRAC, TRBC1 or TRBC2, e.g. TRAC) or its regulatory elements, e.g., an indel at or near a target sequence of a gRNA comprising a targeting domain to a component of a TCR (e.g., TRAC, TRBC1 or TRBC2, e.g. TRAC);
[0858] (d) An indel at or near a sequence of the gene encoding B2M or its regulatory elements, e.g., an indel at or near a target sequence of a gRNA comprising a targeting domain to B2M; and

[0859] Optionally, an indel at or near a sequence of the gene encoding an inhibitory molecule (e.g., PDCD1) or its regulatory elements, e.g., an indel at or near a target sequence of a gRNA comprising a targeting domain to PDCD1; Wherein the cell (or population of cells comprises one or more cells which) expresses the CAR, and exhibits reduced or eliminated expression and/or function of a molecule that regulates the expression of MHC II and reduced or eliminated expression and/or function of one or more of: i) a component of a TCR (e.g., TRAC, TRBC1 or TRBC2, e.g. TRAC), ii) B2M, and/or iii) PD-1.

[0860] In any of the aforementioned embodiments and aspects the cell comprises one or more CRISPR systems, e.g., as described herein, comprising the gRNA molecule(s) indicated. In embodiments, the cell comprises one or more ribonuclear protein (RNP) complexes each comprising a Cas9 molecule, e.g., as described herein, and a gRNA molecule comprising the indicated targeting domain, e.g., as described herein. In embodiments, including in any of the methods described herein, where gRNAs to more than one target sequence are employed, the gRNAs (and CRISPR systems comprising said gRNAs) may be introduced into the cell simultaneously. In other embodiments, including in any of the methods described herein, where gRNAs to more than one target sequence are employed, the gRNAs (and CRISPR systems comprising said gRNAs) may be introduced into the cell sequentially.

[0861] In an aspect involving any of the aforementioned embodiments or aspects, the population of cells comprises at least 20%, e.g., at least 30%, at least 40%, at least 50%, at least 60%, at least 70%, at least 80%, at least 90%, at least 95%, or at least 99%, of cells which include an insertion of nucleic acid sequence encoding the CAR at or near the target sequence of a gRNA targeting a first target, i.e., a molecule that regulates the expression of MHC II and a second target, i.e., a component of the T cell system, and optionally a third target, i.e., a molecule that regulates the expression of MHC I (as described herein), e.g., include an insertion of nucleic acid sequence encoding the CAR at or near the target sequence of a gRNA targeting a first target, i.e., a molecule that regulates the expression of MHC II and a second target, i.e., a component of the T cell system, and optionally a third target, i.e., a molecule that regulates the expression of MHC I (as described herein) at only one allele. In an aspect involving any of the aforementioned embodiments or aspects, the population of cells comprises at least 20%, e.g., at least 30%, at least 40%, at least 50%, at least 60%, at least 70%, at least 80%, at least 90%, at least 95%, or at least 99%, of cells which include an indel at or near each of the target sequences targeted by each of the gRNA molecules. Said population may be obtained, for example, by utilizing high efficiency gRNA molecules (e.g., gRNA molecules which cause an indel in >85% of said cells which are exposed to said gRNA molecule), or by enriching the population for the desired cell, e.g., by selecting for the desired cell population, e.g., by affinity chromatography or cell sorting.

### VI. Template Nucleic Acids (for Modification of Nucleic Acid Sequence)

[0862] In an aspect, the disclosure provides for insertion of nucleic acid sequence, e.g., nucleic acid sequence from a template nucleic acid, at or near a target sequence recognized by a CRISPR system, e.g., a CRISPR system comprising a gRNA molecule to a first target, i.e., a molecule that regulates the expression of MHC II and a second target, i.e., a component of the T cell system, and optionally a third target, i.e., a molecule that regulates the expression of MHC I, e.g., described herein. In an embodiment, nucleic acid sequence at or near the target sequence is modified to have some or all of the sequence of the template nucleic acid, typically at or near cleavage site(s). In an embodiment, the template nucleic acid is single stranded. In an alternate embodiment, the template nucleic acid is double stranded. In an embodiment, the template nucleic acid is DNA, e.g., double stranded DNA. In an alternate embodiment, the template nucleic acid is single stranded DNA.

[0863] In embodiments, the template nucleic acid comprises sequence encoding a first heterologous protein, for example, a chimeric antigen receptor (CAR), e.g., a CAR as described above in section IV. In some embodiments, the template nucleic acid further comprises another nucleic acid sequence encoding a second heterologous protein. In some embodiments, the sequence encoding the first heterologous protein and the sequence encoding the second heterologous protein are transcribed as a single transcript. In embodiments, two (or more) proteins of interest may be separated from each other by inclusion of an intervening cleavage site, such as a 2A cleavage site. In other embodiments, the template nucleic acid includes an internal ribosomal entry site (IRES), such that the two (or more) proteins are produced as separate proteins from the same mRNA. Examples of 2A cleavage sites that can be used as described herein are shown below:

2A Peptide: Amino acid sequence*
T2A:
(SEQ ID NO: 130)
(GSG) E G R G S L L T C G D V E E N P G P
P2A:
(SEQ ID NO: 131)
(GSG) A T N F S L L K Q A G D V E E N P G P
E2A:
(SEQ ID NO: 132)
(GSG) Q C T N Y A L L K L A G D V E S N P G P
F2A:
(SEQ ID NO: 133)
(GSG) V K Q T L N F D L L K L A G D V E S N P G P

[0864] (GSG) sequence is optional, and can be added to the 5′ end of the 2A sequence to improve cleavage in some contexts.

[0865] In an embodiment, the template nucleic acid alters the structure of the target position by participating in an insertion event, e.g., a homology directed repair event. In an embodiment, the template nucleic acid alters the sequence of the target position, for example by insertion of part or all of the template nucleic acid sequence at or near the target sequence. In an embodiment, the template nucleic acid results in the incorporation of a modified or non-naturally occurring base at or near the target sequence.

[0866] Mutations in a gene or pathway described herein may be corrected using one of the approaches discussed herein. In an embodiment, a mutation in a gene or pathway described herein is corrected by homology directed repair (HDR) using a template nucleic acid. In an embodiment, a mutation in a gene or pathway described herein is corrected by homologous recombination (HR) using a template nucleic acid. In an embodiment, a mutation in a gene or pathway described herein is corrected by Non-Homologous End Joining (NHEJ) repair using a template nucleic acid. In other embodiments, nucleic acid encoding molecules of interest may be inserted at or near a site modified by a CRISPR system. In an embodiment, the nucleic acid inserted encodes a chimeric antigen receptor as described herein. In embodiments, the template nucleic acid comprises regulatory elements, e.g., one or more promotors and/or enhancers, operably linked to the nucleic acid sequence encoding a molecule of interest, e.g., a chimeric antigen receptor, e.g., as described herein.

HDR Repair and/or Insertion, and Template Nucleic Acids

[0867] As described herein, nuclease-induced homology directed repair (HDR) can be used to alter a target sequence (e.g., insert heterologous nucleic acid, e.g., insert nucleic acid encoding a heterologous protein) and/or correct (e.g., repair or edit) a mutation in the genome. While not wishing to be bound by theory, it is believed that alteration of the target sequence occurs by homology-directed repair (HDR) with a donor template or template nucleic acid. For example, the donor template or the template nucleic acid provides for alteration of the target sequence. It is contemplated that a plasmid donor can be used as a template for homologous recombination. It is contemplated that a vector can be used as a template nucleic acid, or can provide the template nucleic acid to a cell of interest. Exemplary vectors include lentiviral vectors, mRNA, adenoviral vectors, adenoassociated viral vectors (AAV), minicircles, and nanoplasmids. In an embodiment, the template nucleic acid is delivered by a recombinant AAV. In some embodiments, the AAV does not incorporate its genome into that of a host cell, e.g., a target cell, e.g., an immune effector cell, e.g., a T cell, e.g., as describe herein. In some embodiments, the AAV can incorporate its genome into that of the host cell. In some embodiments, the AAV is a self-complementary adenoassociated virus (scAAV), e.g., a scAAV that packages both strands which anneal together to form double stranded DNA. In an embodiment, an AAV capsid that can be used in the methods described herein is a capsid sequence from serotype AAV1, AAV2, AAV3, AAV4, AAV5, AAV6, AAV7, AAV8, AAV9, AAV.rh8, AAV.rh10, AAV rh32/33, AAV.rh43, AAV.rh64R1, or AAV7m8. In an embodiment, the template nucleic acid is delivered in a re-engineered AAV capsid, e.g., with 50% or greater, e.g., 60% or greater, 70% or greater, 80% or greater, 90% or greater, or 95% or greater, sequence homology with a capsid sequence from serotypes AAV1, AAV2, AAV3, AAV4, AAV5, AAV6, AAV7, AAV8, AAV9, AAV.rh8, AAV.rh10, AAV.rh32/33, AAV.rh43, or AAV.rh64R1. In an embodiment, the template nucleic acid is delivered by a chimeric AAV capsid. Exemplary chimeric AAV capsids include, but are not limited to, AAV9i1, AAV2i8, AAV-DJ, AAV2G9, AAV2i8G9, or AAV8G9. In an embodiment, the vector is an AAV6 vector or reengineered AAV6 vector. It is further contemplated that a single stranded donor template can be used as a template for alteration of the target sequence by alternate methods of homology directed repair (e.g., single strand annealing) between the target sequence and the template nucleic acid. Template nucleic acid-effected alteration of a target sequence depends on cleavage by a Cas9 molecule. Cleavage by Cas9 can comprise a double strand break or two single strand breaks.

[0868] In an embodiment, a mutation can be corrected or nucleic acid sequence inserted by either a single double-strand break or two single strand breaks. In an embodiment, a mutation can be corrected or nucleic acid sequence inserted by (1) a single double-strand break, (2) two single strand breaks, (3) two double stranded breaks with a break occurring on each side of the target sequence, (4) one double stranded breaks and two single strand breaks with the double strand break and two single strand breaks occurring on each side of the target sequence or (5) four single stranded breaks with a pair of single stranded breaks occurring on each side of the target sequence.

### Double Strand Break Mediated Correction or Insertion

[0869] In an embodiment, double strand cleavage is effected by a Cas9 molecule having the ability to cleave both strands of DNA, for example, having cleavage activity associated with an HNH-like domain and cleavage activity associated with a RuvC-like domain, e.g., an N-terminal RuvC-like domain, e.g., a wild type Cas9. Such embodiments require only a single gRNA.

### Single Strand Break Mediated Correction or Insertion

[0870] In other embodiments, two single strand breaks, or nicks, are effected by a Cas9 molecule having nickase activity, e.g., cleavage activity associated with an HNH-like domain or cleavage activity associated with an N-terminal RuvC-like domain. Such embodiments require two gRNAs, one for placement of each single strand break. In an embodiment, the Cas9 molecule having nickase activity cleaves the strand to which the gRNA hybridizes, but not the strand that is complementary to the strand to which the gRNA hybridizes. In an embodiment, the Cas9 molecule having nickase activity does not cleave the strand to which the gRNA hybridizes, but rather cleaves the strand that is complementary to the strand to which the gRNA hybridizes.

[0871] In an embodiment, the nickase has HNH activity, e.g., a Cas9 molecule having the RuvC activity inactivated, e.g., a Cas9 molecule having a mutation at D10, e.g., the D10A mutation. D10A inactivates RuvC; therefore, the Cas9 nickase has (only) HNH activity and will cut on the strand to which the gRNA hybridizes (e.g., the complementary strand, which does not have the NGG PAM on it). In other embodiments, a Cas9 molecule having an H840, e.g., an H840A, mutation can be used as a nickase. H840A inactivates HNH; therefore, the Cas9 nickase has (only) RuvC activity and cuts on the non-complementary strand (e.g., the strand that has the NGG PAM and whose sequence is identical to the gRNA).

[0872] In an embodiment, in which a nickase and two gRNAs are used to position two single strand nicks, one nick is on the +strand and one nick is on the −strand of the target nucleic acid. The PAMs are outwardly facing. The gRNAs can be selected such that the gRNAs are separated by, from about 0-50, 0-100, or 0-200 nucleotides. In an embodiment, there is no overlap between the target sequence that is complementary to the targeting domains of the two gRNAs. In an embodiment, the gRNAs do not overlap and are separated by as much as 50, 100, or 200 nucleotides. In an embodiment, the use of two gRNAs can increase specificity, e.g., by decreasing off-target binding (Ran el al., CELL 2013).

[0873] In an embodiment, a single nick can be used to induce HDR. It is contemplated herein that a single nick can be used to increase the ratio of HDR, HR or NHEJ at a given cleavage site.

### Placement of the Double Strand Break or a Single Strand Break Relative to Target Position

[0874] The double strand break or single strand break in one of the strands should be sufficiently close to target position such that correction or insertion occurs at or near said target position. In an embodiment, the distance is not more than 50, 100, 200, 300, 350 or 400 nucleotides. While not wishing to be bound by theory, it is believed that the break should be sufficiently close to target position such that the break is within the region that is subject to exonuclease-mediated removal during end resection. If the distance between the target position and a break is too great, the mutation may not be included in the end resection and, therefore, may not be corrected, as donor sequence may only be used to correct sequence within the end resection region. For insertion, the distance between the target position (i.e., the position where the heterologous sequence is desired to be inserted) and the break should also be sufficiently close.

[0875] In an embodiment in which a gRNA (e.g., sgRNA or dgRNA) and Cas9 nuclease induce a double strand break for the purpose of inducing HDR- or HR-mediated correction or insertion, the cleavage site is between 0-200 bp (e.g., 0 to 175, 0 to 150, 0 to 125, 0 to 100, 0 to 75, 0 to 50, 0 to 25, 25 to 200, 25 to 175, 25 to 150, 25 to 125, 25 to 100, 25 to 75, 25 to 50, 50 to 200, 50 to 175, 50 to 150, 50 to 125, 50 to 100, 50 to 75, 75 to 200, 75 to 175, 75 to 150, 75 to 125, 75 to 100 bp) away from the target position. In an embodiment, the cleavage site is between 0-100 bp (e.g., 0 to 75, 0 to 50, 0 to 25, 25 to 100, 25 to 75, 25 to 50, 50 to 100, 50 to 75 or 75 to 100 bp) away from the target position.

[0876] In an embodiment, in which two gRNAs (independently, unimolecular (or chimeric) or modular gRNA) complexing with Cas9 nickases induce two single strand breaks for the purpose of inducing HDR-mediated correction or insertion, the closer nick is between 0-20 bp (e.g., 0 to 175, 0 to 150, 0 to 125, 0 to 100, 0 to 75, 0 to 50, 0 to 25, 25 to 200, 25 to 175, 25 to 150, 25 to 125, 25 to 100, 25 to 75, 25 to 50, 50 to 200, 50 to 175, 50 to 150, 50 to 125, 50 to 100, 50 to 75, 75 to 200, 75 to 175, 75 to 150, 75 to 125, 75 to 100 bp) away from the target position and the two nicks will ideally be within 25-55 bp of each other (e.g., 25 to 50, 25 to 45, 25 to 40, 25 to 35, 25 to 30, 30 to 55, 30 to 50, 30 to 45, 30 to 40, 30 to 35, 35 to 55, 35 to 50, 35 to 45, 35 to 40, 40 to 55, 40 to 50, 40 to 45 bp) and no more than 100 bp away from each other (e.g., no more than 90, 80, 70, 60, 50, 40, 30, 20, 10 or 5 bp away from each other). In an embodiment, the cleavage site is between 0-100 bp (e.g., 0 to 75, 0 to 50, 0 to 25, 25 to 100, 25 to 75, 25 to 50, 50 to 100, 50 to 75 or 75 to 100 bp) away from the target position.

[0877] In one embodiment, two gRNAs, e.g., independently, unimolecular (or chimeric) or modular gRNA, are configured to position a double-strand break on both sides of a target position. In an alternate embodiment, three gRNAs, e.g., independently, unimolecular (or chimeric) or modular gRNA, are configured to position a double strand break (i.e., one gRNA complexes with a Cas9 nuclease) and two single strand breaks or paired single stranded breaks (i.e., two gRNAs complex with Cas9 nickases) on either side of the target position (e.g., the first gRNA is used to target upstream (i.e., 5′) of the target position and the second gRNA is used to target downstream (i.e., 3′) of the target position). In another embodiment, four gRNAs, e.g., independently, unimolecular (or chimeric) or modular gRNA, are configured to generate two pairs of single stranded breaks (i.e., two pairs of two gRNAs complex with Cas9 nickases) on either side of the target position (e.g., the first gRNA is used to target upstream (i.e., 5′) of the target position and the second gRNA is used to target downstream (i.e., 3′) of the target position). The double strand break(s) or the closer of the two single strand nicks in a pair will ideally be within 0-500 bp of the target position (e.g., no more than 450, 400, 350, 300, 250, 200, 150, 100, 50 or 25 bp from the target position). When nickases are used, the two nicks in a pair are within 25-55 bp of each other (e.g., between 25 to 50, 25 to 45, 25 to 40, 25 to 35, 25 to 30, 50 to 55, 45 to 55, 40 to 55, 35 to 55, 30 to 55, 30 to 50, 35, to 50, 40 to 50, 45 to 50, 35 to 45, or 40 to 45 bp) and no more than 100 bp away from each other (e.g., no more than 90, 80, 70, 60, 50, 40, 30, 20 or 10 bp).

[0878] In one embodiment, two gRNAs, e.g., independently, unimolecular (or chimeric) or modular gRNA, are configured to position a double-strand break on both sides of a target position. In an alternate embodiment, three gRNAs, e.g., independently, unimolecular (or chimeric) or modular gRNA, are configured to position a double strand break (i.e., one gRNA complexes with a Cas9 nuclease) and two single strand breaks or paired single stranded breaks (i.e., two gRNAs complex with Cas9 nickases) on two target sequences (e.g., the first gRNA is used to target an upstream (i.e., 5′) target sequence and the second gRNA is used to target a downstream (i.e., 3′) target sequence of an insertion site. In another embodiment, four gRNAs, e.g., independently, unimolecular (or chimeric) or modular gRNA, are configured to generate two pairs of single stranded breaks (i.e., two pairs of two gRNAs complex with Cas9 nickases) on either side of an insertion site (e.g., the first gRNA is used to target an upstream (i.e., 5) target sequence described herein, and the second gRNA is used to target a downstream (i.e., 3) target sequence described herein). The double strand break(s) or the closer of the two single strand nicks in a pair will ideally be within 0-500 bp of the target position (e.g., no more than 450, 400, 350, 300, 250, 200, 150, 100, 50 or 25 bp from the target position). When nickases are used, the two nicks in a pair are within 25-55 bp of each other (e.g., between 25 to 50, 25 to 45, 25 to 40, 25 to 35, 25 to 30, 50 to 55, 45 to 55, 40 to 55, 35 to 55, 30 to 55, 30 to 50, 35 to 50, 40 to 50, 45 to 50, 35 to 45, or 40 to 45 bp) and no more than 100 bp away from each other (e.g., no more than 90, 80, 70, 60, 50, 40, 30, 20 or 10 bp).

### Length of the Homology Arms

[0879] In embodiments, incorporation of the heterologous sequence may be facilitated by including in the template nucleic acid one or more, e.g., two (e.g., a 5′ and a 3′), homology arms having homology to sequence at or near, e.g., adjacent to, the target sequence or double strand break, e.g., homology arms having homology to sequence within a first sequence of a molecule that regulates the expression of MHC I, and a second sequence of a component of the T cell system, and optionally a third sequence of a molecule that regulates the expression of MHC I, or to sequence comprising sequence within a first sequence of a molecule that regulates the expression of MHC II, and a second sequence of a component of the T cell system, and optionally a third sequence of a molecule that regulates the expression of MHC I. The homology arm should extend at least as far as the region in which end resection may occur, e.g., in order to allow the resected single stranded overhang to find a complementary region within the donor template. The overall length could be limited by parameters such as plasmid size or viral packaging limits. In an embodiment, a homology arm does not extend into repeated elements, e.g., ALU repeats, LINE repeats. A template may have two homology arms of the same or different lengths.

[0880] Exemplary homology arm lengths include at least about 25, 50, 100, 200 250, 500, 750, 1000, or 1500 nucleotides.

[0881] In some embodiments, a homology arm length of about 200 nucleotides or less may be used, e.g., if there are regions of repeats present within the genomic region of homology which would otherwise be targeted by a longer homology arm. “Target position,” as used herein, refers to a site on a target nucleic acid (e.g., the chromosome) that is modified by a Cas9 molecule-dependent process. For example, the target position can be a modified Cas9 molecule cleavage of the target nucleic acid and template nucleic acid directed modification, e.g., correction or insertion, of the target position. In an embodiment, a target position can be a site between two nucleotides, e.g., adjacent nucleotides, on the target nucleic acid into which one or more nucleotides is added. The target position may comprise one or more nucleotides that are altered, e.g., corrected, by a template nucleic acid. In an embodiment, the target position is within a target sequence (e.g., the sequence to which the gRNA binds). In an embodiment, a target position is upstream or downstream of a target sequence (e.g., the sequence to which the gRNA binds).

[0882] Typically, the template sequence undergoes a breakage mediated or catalyzed recombination with the target sequence. In an embodiment, the template nucleic acid includes sequence that corresponds to a site on the target sequence that is cleaved by a Cas9 mediated cleavage event. In an embodiment, the template nucleic acid includes sequence that corresponds to both a first site on the target sequence that is cleaved in a first Cas9 mediated event, and a second site on the target sequence that is cleaved in a second Cas9 mediated event.

[0883] In an embodiment, the template nucleic acid can include sequence which results in an alteration in the coding sequence of a translated sequence, e.g., one which results in the substitution of one amino acid for another in a protein product, e.g., transforming a mutant allele into a wild type allele, transforming a wild type allele into a mutant allele, and/or introducing a stop codon, insertion of an amino acid residue, deletion of an amino acid residue, or a nonsense mutation.

[0884] In other embodiments, the template nucleic acid can include sequence which results in an alteration in a coding sequence, e.g., in an exon, or non-coding sequence, e.g., an alteration in an intron or in a 5′ or 3′ non-translated or non-transcribed region. Such alterations include an alteration in a control element, e.g., a promoter, enhancer, and an alteration in a cis-acting or trans-acting control element. In some embodiments, the alteration includes the insertion of nucleic acid sequence, e.g., nucleic acid sequence encoding a heterologous protein, e.g., a CAR, e.g., as described herein, at or near the target sequence, e.g., the target sequence recognized by a gRNA molecule described herein.

[0885] The template nucleic acid can include sequence which, when integrated, results in:
[0886] decreasing the activity of a positive control element;
[0887] increasing the activity of a positive control element;
[0888] decreasing the activity of a negative control element;
[0889] increasing the activity of a negative control element;
[0890] decreasing the expression of a gene;
[0891] increasing the expression of a gene;
[0892] increasing resistance to a disorder or disease;
[0893] increasing resistance to viral entry;
[0894] correcting a mutation or altering an unwanted amino acid residue
[0895] conferring, increasing, abolishing or decreasing a biological property of a gene product, e.g., increasing the enzymatic activity of an enzyme, or increasing the ability of a gene product to interact with another molecule.

[0896] The template nucleic acid can include sequence which results in:
[0897] a change in sequence of 1, 2, 3, 4, 5, 6, 7, 8, 9, 10, 11, 12 or more nucleotides of the target sequence.

[0898] In an embodiment, the template nucleic acid is 20+/−10, 30+/−10, 40+/−10, 50+/−10, 60+/−10, 70+/−10, 80+/−10, 90+/−10, 100+/−10, 110+/−10, 120+/−10, 130+/−10, 140+/−10, 150+/−10, 160+/−10, 170+/−10, 180+/−10, 190+/−10, 200+/−10, 210+/−10, 220+/−10, 200-300, 300-400, 400-500, 500-600, 600-700, 700-800, 800-900, 900-1000, 1000-2000, 2000-3000 or more than 3000 nucleotides in length.

[0899] A template nucleic acid comprises the following components:

[0900] [5′ homology arm]-[insertion sequence]-[3′ homology arm].

[0901] The homology arms provide for recombination into the chromosome, which can replace the undesired element, e.g., a mutation or signature, with the replacement sequence, or insert the desired sequence. In an embodiment, the homology arms flank the most distal cleavage sites.

[0902] In an embodiment, the 3′ end of the 5′ homology arm is the position next to the 5′ end of the replacement sequence. In an embodiment, the 5′ homology arm can extend at least 10, 20, 30, 40, 50, 60, 70, 80, 90, 100, 120, 150, 180, 200, 300, 400, 500, 600, 700, 800, 900, 1000, 1500, or 2000 nucleotides 5′ from the 5′ end of the replacement sequence.

[0903] In an embodiment, the 5′ end of the 3′ homology arm is the position next to the 3′ end of the replacement sequence. In an embodiment, the 3′ homology arm can extend at least 10, 20, 30, 40, 50, 60, 70, 80, 90, 100, 120, 150, 180, 200, 300, 400, 500, 600, 700, 800, 900, 1000, 1500, or 2000 nucleotides 3′ from the 3′ end of the replacement sequence.

[0904] It is contemplated herein that one or both homology arms may be shortened to avoid including certain sequence repeat elements, e.g., Alu repeats, LINE elements. For example, a 5′ homology arm may be shortened to avoid a sequence repeat element. In other embodiments, a 3′ homology arm may be shortened to avoid a sequence repeat element. In some embodiments, both the 5′ and the 3′ homology arms may be shortened to avoid including certain sequence repeat elements.

[0905] It is contemplated herein that template nucleic acids for correcting a mutation may designed for use as a single-stranded oligonucleotide (ssODN). When using a ssODN, 5′ and 3′ homology arms may range up to about 200 base pairs (bp) in length, e.g., at least 25, 50, 75, 100, 125, 150, 175, or 200 bp in length. Longer homology arms are also contemplated for ssODNs as improvements in oligonucleotide synthesis continue to be made.

[0906] In one aspect, the insertion sequence comprises nucleic acid sequence that encodes a chimeric antigen receptor, e.g., as described herein. In one embodiment the insertion sequence further comprises a promotor operably linked to the nucleic acid sequence encoding a chimeric antigen receptor, e.g., an EF-1 alpha promoter. In one aspect, the insertion sequence comprises a vector encoding a chimeric antigen receptor, e.g., as described herein, or a portion thereof.

### NHEJ Approaches for Gene Targeting

[0907] As described herein, nuclease-induced non-homologous end-joining (NHEJ) can be used to target gene-specific knockouts. Nuclease-induced NHEJ can also be used to remove (e.g., delete) sequence in a gene of interest.

[0908] While not wishing to be bound by theory, it is believed that, in an embodiment, the genomic alterations associated with the methods described herein rely on nuclease-induced NHEJ and the error-prone nature of the NHEJ repair pathway. NHEJ repairs a double-strand break in the DNA by joining together the two ends; however, generally, the original sequence is restored only if two compatible ends, exactly as they were formed by the double-strand break, are perfectly ligated. The DNA ends of the double-strand break are frequently the subject of enzymatic processing, resulting in the addition or removal of nucleotides, at one or both strands, prior to rejoining of the ends. This results in the presence of insertion and/or deletion (indel) mutations in the DNA sequence at the site of the NHEJ repair. Two-thirds of these mutations may alter the reading frame and, therefore, produce a non-functional protein. Additionally, mutations that maintain the reading frame, but which insert or delete a significant amount of sequence, can destroy functionality of the protein. This is locus dependent as mutations in critical functional domains are likely less tolerable than mutations in non-critical regions of the protein.

[0909] The indel mutations generated by NHEJ are unpredictable in nature; however, at a given break site certain indel sequences are favored and are over represented in the population. The lengths of deletions can vary widely; most commonly in the 1-50 bp range, but they can easily reach greater than 100-200 bp. Insertions tend to be shorter and often include short duplications of the sequence immediately surrounding the break site. However, it is possible to obtain large insertions, and in these cases, the inserted sequence has often been traced to other regions of the genome or to plasmid DNA present in the cells.

[0910] Because NHEJ is a mutagenic process, it can also be used to delete small sequence motifs as long as the generation of a specific final sequence is not required. If a double-strand break is targeted near to a short target sequence, the deletion mutations caused by the NHEJ repair often span, and therefore remove, the unwanted nucleotides. For the deletion of larger DNA segments, introducing two double-strand breaks, one on each side of the sequence, can result in NHEJ between the ends with removal of the entire intervening sequence. Both of these approaches can be used to delete specific DNA sequences; however, the error-prone nature of NHEJ may still produce indel mutations at the site of repair.

[0911] Both double strand cleaving Cas9 molecules and single strand, or nickase, Cas9 molecules can be used in the methods and compositions described herein to generate NHEJ-mediated indels. NHEJ-mediated indels targeted to the gene, e.g., a coding region, e.g., an early coding region of a gene of interest can be used to knockout (i.e., eliminate expression of) a gene of interest. For example, early coding region of a gene of interest includes sequence immediately following a transcription start site, within a first exon of the coding sequence, or within 500 bp of the transcription start site (e.g., less than 500, 450, 400, 350, 300, 250, 200, 150, 100 or 50 bp).

### Placement of Double Strand or Single Strand Breaks Relative to the Target Position

[0912] In an embodiment, in which a gRNA and Cas9 nuclease generate a double strand break for the purpose of inducing NHEJ-mediated indels, a gRNA, e.g., a unimolecular (or chimeric) or modular gRNA molecule, is configured to position one double-strand break in close proximity to a nucleotide of the target position. In an embodiment, the cleavage site is between 0-500 bp away from the target position (e.g., less than 500, 400, 300, 200, 100, 50, 40, 30, 25, 20, 15, 10, 9, 8, 7, 6, 5, 4, 3, 2 or 1 bp from the target position).

[0913] In an embodiment, in which two gRNAs complexing with Cas9 nickases induce two single strand breaks for the purpose of inducing NHEJ-mediated indels, two gRNAs, e.g., independently, unimolecular (or chimeric) or modular gRNA, are configured to position two single-strand breaks to provide for NHEJ repair a nucleotide of the target position. In an embodiment, the gRNAs are configured to position cuts at the same position, or within a few nucleotides of one another, on different strands, essentially mimicking a double strand break. In an embodiment, the closer nick is between 0-30 bp away from the target position (e.g., less than 30, 25, 20, 1, 10, 9, 8, 7, 6, 5, 4, 3, 2 or 1 bp from the target position), and the two nicks are within 25-55 bp of each other (e.g., between 25 to 50, 25 to 45, 25 to 40, 25 to 35, 25 to 30, 50 to 55, 45 to 55, 40 to 55, 35 to 55, 30 to 55, 30 to 50, 35 to 50, 40 to 50, 45 to 50, 35 to 45, or 40 to 45 bp) and no more than 100 bp away from each other (e.g., no more than 90, 80, 70, 60, 50, 40, 30, 20 or 10 bp). In an embodiment, the gRNAs are configured to place a single strand break on either side of a nucleotide of the target position.

[0914] Both double strand cleaving Cas9 molecules and single strand, or nickase, Cas9 molecules can be used in the methods and compositions described herein to generate breaks both sides of a target position. Double strand or paired single strand breaks may be generated on both sides of a target position to remove the nucleic acid sequence between the two cuts (e.g., the region between the two breaks is deleted). In one embodiment, two gRNAs, e.g., independently, unimolecular (or chimeric) or modular gRNA, are configured to position a double-strand break on both sides of a target position (e.g., the first gRNA is used to target upstream (i.e., 5′) of the mutation in a gene or pathway described herein, and the second gRNA is used to target downstream (i.e., 3′) of the mutation in a gene or pathway described herein). In an alternate embodiment, three gRNAs, e.g., independently, unimolecular (or chimeric) or modular gRNA, are configured to position a double strand break (i.e., one gRNA complexes with a Cas9 nuclease) and two single strand breaks or paired single stranded breaks (i.e., two gRNAs complex with Cas9 nickases) on either side of a target position (e.g., the first gRNA is used to target upstream (i.e., 5′) of the mutation in a gene or pathway described herein, and the second gRNA is used to target downstream (i.e., 3′) of the mutation in a gene or pathway described herein). In another embodiment, four gRNAs, e.g., independently, unimolecular (or chimeric) or modular gRNA, are configured to generate two pairs of single stranded breaks (i.e., two pairs of two gRNAs complex with Cas9 nickases) on either side of the target position (e.g., the first gRNA is used to target upstream (i.e., 5′) of the mutation in a gene or pathway described herein, and the second gRNA is used to target downstream (i.e., 3) of the mutation in a gene or pathway described herein). The double strand break(s) or the closer of the two single strand nicks in a pair will ideally be within 0-500 bp of the target position (e.g., no more than 450, 400, 350, 300, 250, 200, 150, 100, 50 or 25 bp from the target position). When nickases are used, the two nicks in a pair are within 25-55 bp of each other (e.g., between 25 to 50, 25 to 45, 25 to 40, 25 to 35, 25 to 30, 50 to 55, 45 to 55, 40 to 55, 35 to 55, 30 to 55, 30 to 50, 35 to 50, 40 to 50, 45 to 50, 35 to 45, or 40 to 45 bp) and no more than 100 bp away from each other (e.g., no more than 90, 80, 70, 60, 50, 40, 30, 20 or 10 bp).

[0915] Thus, in a specific embodiment, the disclosure provides a method of manufacturing a cell, e.g., an immune effector cell, e.g., a T cell, e.g., as described herein, for adoptive immunotherapy, the method comprising:
[0916] a) Introducing into said cell 1) a plurality of gRNA molecules (e.g., a CRISPR system comprising said gRNA molecules) described herein, e.g., a gRNA molecule to a first target, i.e., a molecule that regulates the expression of MHC II, a gRNA molecule to a second target, i.e., a component of the T cell system, and optionally a gRNA to a third target, i.e., a molecule that regulates the expression of MHC I, and 2) a template nucleic acid, e.g., a template nucleic acid comprising nucleic acid sequence encoding a CAR (e.g., as described herein):

[0917] Wherein at least a portion of the template nucleic acid (e.g., the nucleic acid sequence encoding a CAR) integrates into the genome of said cell within a first sequence of a molecule that regulates the expression of MHC II, and a second sequence of a component of the T cell system, and optionally a third sequence of a molecule that regulates the expression of MHC I.

VII. Systems Comprising More than One gRNA Molecule

[0918] While not intending to be bound by theory, targeting of two target sequences (e.g., by two gRNA molecule/Cas9 molecule complexes which each induce a single- or double-strand break at or near their respective target sequences) located in close proximity on a continuous nucleic acid induces excision (e.g., deletion) of the nucleic acid sequence (or at least 80%, 85%, 90%, 95%, 96%, 97%, 98%, 99% of the nucleic acid sequence) located between the two target sequences. In some aspects, the present disclosure provides for the use of two or more gRNA molecules that comprise targeting domains targeting target sequences in close proximity on a continuous nucleic acid, e.g., a chromosome, e.g., a gene or gene locus, including its introns, exons and regulatory elements. The use may be, for example, by introduction of the two or more gRNA molecules, together with one or more Cas9 molecules (or nucleic acid encoding the two or more gRNA molecules and/or the one or more Cas9 molecules) into a cell. Such systems may be used, for example, to insert heterologous nucleic acid sequence, e.g., sequence from a template nucleic acid, e.g., sequence encoding a CAR (e.g., as described herein) into the site of the excision.

[0919] In some aspects, the target sequences of the two or more gRNA molecules are located at least 5, 6, 7, 8, 9, 10, 20, 30, 40, 50, 60, 70, 80, 90, 100, 200, 300, 400, 500, 600, 700, 800, 900, 1000, 2000, 3000, 4000, 5000, 6000, or 70000 nucleotides apart on a continuous nucleic acid, but not more than 10000 nucleotides apart on a continuous nucleic acid. In an embodiment, the target sequences are located about 4000 nucleotides apart. In an embodiment, the target sequences are located about 6000 nucleotides apart.

[0920] In some aspects, the plurality of gRNA molecules each target sequences within the same gene or gene locus. In another aspect, the plurality of gRNA molecules each target sequences within 2 or more different genes.

[0921] In some embodiments, the plurality of gRNA molecules targets a first target, i.e., a molecule that regulates the expression of MHC II and a second target, i.e., a component of the T cell system, and optionally a third target, i.e., a molecule that regulates the expression of MHC I.

[0922] In some embodiments, the plurality of gRNA molecules targets at least one gene associated with MHC I expression, e.g., HLA-A, HLA-B, HLA-C, B2M, and/or NLRC5. In some embodiments, the plurality of gRNA molecules targets one such gene. In some embodiments, the plurality of gRNA molecules targets two or more different genes, e.g., HLA-A, HLA-B, HLA-C, B2M, and/or NLRC5.

[0923] In some embodiments, the plurality of gRNA molecules targets at least one gene associated with MHC II expression, e.g., HLA-DM, HLA-DO, HLA-DR, HLA-DQ, HLA-DP, CIITA, RFXANK, RFXAP, RFX1, RFX5, NF-YA, NF-YB, NF-YC, X2BP, and/or OCAB. In some embodiments, the plurality of gRNA molecules targets one such gene. In some embodiments, the plurality of gRNA molecules targets two or more different genes, e.g., MHC II HLA-DM, HLA-DO, HLA-DR, HLA-DQ, HLA-DP, CIITA, RFXANK, RFXAP, RFX1, RFX5, NF-YA, NF-YB, NF-YC, X2BP, and/or OCAB.

[0924] In one embodiment, the plurality of gRNA molecules targets at least one gene associated with MHC I expression and at least one gene that regulates MHC II expression. For example, the plurality of gRNA molecules targets B2M and one or more of CIITA, RFXANK, RFXAP, RFX1, and RFX5.

[0925] In some embodiments, the plurality of gRNA molecules targets at least one gene associated with MHC I expression and/or at least one gene associated with MHC II expression and further targets at least one component of the T cell receptor, e.g., the TRAC and/or TRBC2 gene. For example, the plurality of gRNA molecules targets B2M; one or more of CIITA, RFXANK, RFXAP, RFX1, and RFX5; and one or more components of the T cell receptor, e.g., TRAC and TRBC2.

[0926] In some aspects, the disclosure provides compositions and cells comprising a plurality, for example, 2 or more, for example, 2, gRNA molecules, wherein the plurality of gRNA molecules target sequences less than 10,000, less than 9,000, less than 8,000, less than 7,000, less than 6,000, less than 5,000, less than 4,000, less than 3,000, less than 2,000, less than 1.000, less than 900, less than 800, less than 700, less than 600, less than 500, less than 400, less than 300, less than 200, less than 100, less than 90, less than 80, less than 70, less than 60, less than 50, less than 40, or less than 30 nucleotides apart. In an embodiment, the target sequences are on the same strand of duplex nucleic acid. In an embodiment, the target sequences are on different strands of duplex nucleic acid.

[0927] In one embodiment, the disclosure provides a method for excising (e.g., deleting) nucleic acid disposed between two gRNA binding sites disposed less than 10,000, less than 9,000, less than 8,000, less than 7,000, less than 6,000, less than 5,000, less than 4.000, less than 3,000, less than 2,000, less than 1,000, less than 900, less than 800, less than 700, less than 600, less than 500, less than 400, less than 300, less than 200, less than 100, less than 90, less than 80, less than 70, less than 60, less than 50, less than 40, or less than 30 nucleotides apart on the same or different strands of duplex nucleic acid. In an embodiment, the method provides for deletion of more than 50%, more than 60%, more than 70%, more than 80%, more than 85%, more than 86%, more than 87%, more than 88%, more than 89%, more than 90%, more than 91%, more than 92%, more than 93%, more than 94%, more than 95%, more than 96%, more than 97%, more than 98%, more than 99%, or 100% of the nucleotides disposed between the PAM sites associated with each gRNA binding site. In embodiments, the deletion further comprises of one or more nucleotides within one or more of the PAM sites associated with each gRNA binding site. In embodiments, the deletion also comprises one or more nucleotides outside of the region between the PAM sites associated with each gRNA binding site.

[0928] In one aspect, the two or more gRNA molecules comprise targeting domains targeting target sequences flanking a gene regulatory element, e.g., a promotor binding site, an enhancer region, or a repressor region, such that excision of the intervening sequence (or a portion of the intervening sequence) causes up- or down-regulation of a gene of interest.

[0929] In an embodiment, the two or more gRNA molecules are selected from the gRNA molecules of Tables 1a-c. In aspects, the two or more gRNA molecules comprise targeting domains that are complementary with sequences in the same gene, for example, same region, e.g., same exon, intron or promoter.

[0930] In addition to the gRNA molecules described herein, e.g., gRNA molecules to a first sequence of a molecule that regulates the expression of MHC II, and a second sequence of a component of the T cell system, and optionally a third sequence of a molecule that regulates the expression of MHC I, the CRISPR systems, cells, methods and other embodiments may further include one or more additional gRNA molecules. CRISPR systems or, in the case of, for example, cells, one or more alterations within other genes, for example, effected by CRISPR systems.

[0931] As described herein, when utilizing more than one gRNA molecule (or CRISPR system comprising more than one gRNA molecule, e.g., a CRISPR system comprising a first gRNA molecule and a CRISPR system comprising a second gRNA molecule, e.g., wherein each gRNA molecule is complexed with a Cas molecule, e.g., a Cas9 molecule, e.g., as described herein), the more than one gRNA molecules may be introduced into a cell simultaneously, e.g., in a single introduction step, e.g., a single electroporation step. Alternatively, the more than one gRNA molecules (or CRISPR systems comprising said gRNA molecules) can be introduced into a cell in more than one steps, e.g., more than one electroporations. If multiple introduction steps are utilized, the steps may be separated by a period of hours, days, or weeks, e.g., by a period of 1 hour, 2 hours, 5 hours, 10 hours, 15 hours, 20 hours, 24 hours, 2 days, 3, days, 4 days, 5 days, 6 days, 7 days, 8 days, 9 days, 10 days, or more.

[0932] In embodiments where template nucleic acid is utilized and it is desired to insert nucleic acid sequence only at a target sequence of one of the gRNA molecules in a system or method utilizing more than one gRNA molecule, the alteration of the cell of interest can be accomplished in stepwise fashion. For example, in a first step, a CRISPR system comprising a gRNA molecule which binds the target sequence where insertion is desired is introduced into the cell together with a template nucleic acid, e.g., as described herein. In a second step, for example, at a time when there is no longer template nucleic acid present in said cell, one or more CRISPR systems comprising one or more gRNA molecules to additional target sequences (e.g., target sequences in genes where it is desired to have reduced or eliminated function or expression of said gene or genes) are introduced. In embodiments, the first and second steps may be reversed in order. In embodiments, the second step may comprise a plurality of steps, each involving a single CRISPR system/gRNA molecule.

[0933] In a specific embodiment, the disclosure provides a method of manufacturing a cell, e.g., an immune effector cell, e.g., a T cell, e.g., as described herein, for adoptive immunotherapy, the method comprising:
[0934] a) Introducing into said cell 1) a gRNA molecule (e.g., a CRISPR system comprising said gRNA molecule) described herein, e.g., a gRNA molecule to a first sequence of a molecule that regulates the expression of MHC II, and a second sequence of a component of the T cell system, and optionally a third sequence of a molecule that regulates the expression of MHC I, and 2) a template nucleic acid, e.g., a template nucleic acid comprising nucleic acid sequence encoding a CAR (e.g., as described herein); and
[0935] b) Introducing into said cell a gRNA molecule (e.g., a CRISPR system comprising said gRNA molecule) comprising a targeting domain specific for a target sequence of a component of the T cell receptor (e.g., TRAC, TRBC1, CD3DEG, or TRBC2), and/or introducing into said cell a gRNA molecule (e.g., a CRISPR system comprising said gRNA molecule) comprising a targeting domain specific for a target sequence of B2M and/or Introducing into said cell a gRNA molecule (e.g., a CRISPR system comprising said gRNA molecule) comprising a targeting domain specific for a target sequence of CIITA, RFXAP, and/or RFX5;

[0936] Wherein at least a portion of the template nucleic acid (e.g., the nucleic acid sequence encoding a CAR) integrates into the genome of said cell within a first sequence of a molecule that regulates the expression of MHC II, and a second sequence of a component of the T cell system, and optionally a third sequence of a molecule that regulates the expression of MHC I and said cell has reduced or eliminated expression of one or more of said molecules, e.g., RFXAP, TRAC, and/or B2M.

[0937] In a specific embodiment, the disclosure provides a method of manufacturing a cell, e.g., an immune effector cell, e.g., a T cell, e.g., as described herein, for adoptive immunotherapy, the method comprising:
[0938] a) Introducing into said cell 1) a gRNA molecule (e.g., a CRISPR system comprising said gRNA molecule) described herein, e.g., a gRNA molecule to a first sequence of a molecule that regulates the expression of MHC I, and a second sequence of a component of the T cell system, and optionally a third sequence of a molecule that regulates the expression of MHC I, and 2) a template nucleic acid, e.g., a template nucleic acid comprising nucleic acid sequence encoding a CAR (e.g., as described herein); and
[0939] b) Introducing into said cell a gRNA molecule (e.g., a CRISPR system comprising said gRNA molecule) comprising a targeting domain specific for a target sequence of a component of the T cell receptor (e.g., TRAC, TRBC, CD3E, CD3D, or CD3G), and/or introducing into said cell a gRNA molecule (e.g., a CRISPR system comprising said gRNA molecule) comprising a targeting domain specific for a target of an immunosuppressant;

[0940] Wherein at least a portion of the template nucleic acid (e.g., the nucleic acid sequence encoding a CAR) integrates into the genome of said cell within a first sequence of a molecule that regulates the expression of MHC II, and a second sequence of a component of the T cell system, and optionally a third sequence of a molecule that regulates the expression of MHC I, and said cell has reduced or eliminated expression of a target for an immunosuppressant. Exemplary targets of an immunosuppressant include FKBP1A or CD52.

VIII. Properties of the gRNA

[0941] While not intending to be bound by theory, gRNA molecules and CRISPR systems comprising said gRNA molecules produce similar or identical indel patterns when the same system is used in the same cell type through multiple experiments. Without being bound by theory, it is believed that some indel patterns may be more advantageous than others. For example, indels which predominantly include insertions and/or deletions which result in a “frameshift mutation” (e.g., 1- or 2-base pair insertion or deletions, or any insertion or deletion where n/3 is not a whole number (where n=the number of nucleotides in the insertion or deletion)) may be beneficial in reducing or eliminating expression of a functional protein. Likewise, indels which predominantly include “large deletions” (deletions of more than 10, 11, 12, 13, 14, 15, 20, 25, or 30 nucleotides) may also be beneficial in, for example, removing critical regulatory sequences such as promoter binding sites, which may similarly have an improved effect on expression of functional protein. While the indel patterns induced by a given gRNA/CRISPR system have surprisingly been found to be consistently reproduced across cell types, as described herein, not any single indel structure will inevitably be produced in a given cell upon introduction of a gRNA/CRISPR system. In embodiments, specific gRNAs, Cas molecules, cell types, scaffolds, etc., may be selected to affect the indel patterns induced by the CRISPR system.

[0942] The disclosure thus provides for gRNA molecules which create a beneficial indel pattern or structure, for example, which have indel patterns or structures predominantly composed of frameshift mutation(s) and/or large deletions. Such gRNA molecules may be selected by assessing the indel pattern or structure created by a candidate gRNA molecule in a test cell (for example, a HEK293 cell or in the cell of interest, e.g., a T cell) by NGS, as described herein. As shown in the Examples, gRNA molecules have been discovered, which, when introduced into the desired cell population, result in a population of cells comprising a significant fraction of the cells having a frameshift mutation in the targeted gene. In some cases, the rate of frameshift mutation is as high as 75%, 80%, 85%, 90% or more. The disclosure thus provides for populations of cells which comprise at least about 40% of cells (e.g., at least about 45%, at least about 50%, at least about 55%, at least about 60%, at least about 65%, at least about 70%, at least about 75%, at least about 80%, at least about 85%, at least about 90%, at least about 95%, or at least about 99%) having a frameshift mutation, e.g., as described herein, at or near the target site of a gRNA molecule described herein. The disclosure also provides for populations of cells which comprise at least about 50% of cells (e.g., at least about 55%, at least about 60%, at least about 65%, at least about 70%, at least about 75%, at least about 80%, at least about 85%, at least about 90%, at least about 95%, or at least about 99%) having a frameshift mutation, e.g., as described herein, at or near the target site of a gRNA molecule described herein.

[0943] The disclosure thus provides methods of selecting gRNA molecules for use in the therapeutic methods comprising: 1) providing a plurality of gRNA molecules to a target of interest, 2) assessing the indel pattern or structure created by use of said gRNA molecules, 3) selecting a gRNA molecule that forms an indel pattern or structure composed predominantly of frameshift mutations, large deletions or a combination thereof, and 4) using said selected gRNA in methods disclosed hereint.

[0944] The disclosure further provides methods of altering cells, and altered cells, wherein a particular indel pattern is consistently produced with a given gRNA/CRISPR system in that cell type.

[0945] It may also be beneficial to utilize gRNA molecules that do not create indels at off-target sequences within the genome of the target cell type, or produce indels at off target sites at very low frequencies (e.g., <5% of cells within a population) relative to the frequency of indel creation at the target site. Thus, the disclosure provides for gRNA molecules and CRISPR systems which do not exhibit off-target indel formation in the target cell type, or which produce a frequency of off-target indel formation of <5%. In embodiments, the disclosure provides gRNA molecules and CRISPR systems which do not exhibit any off target indel formation in the target cell type. Thus, the disclosure further provides a cell, e.g., a population of cells, e.g., immune effector cells, e.g., CAR-expressing immune effector cells, e.g., as described herein, which comprise an indel at or near a target site of a gRNA molecule described herein (e.g., a frameshift indel, or any one of the top 5 indels produced by a given gRNA/CRISPR system, e.g., as described herein), but does not comprise an indel at any off-target site of the gRNA molecule. In other embodiments, the disclosure further provides a population of cells, e.g., immune effector cells, e.g., CAR-expressing immune effector cells, e.g., as described herein, which comprises >50% of cells which have an indel at or near a target site of a gRNA molecule described herein (e.g., a frameshift indel, or any one of the top 5 indels produced by a given gRNA/CRISPR system, e.g., as described herein), but which comprises less than 5%, e.g., less than 4%, less than 3%, less than 2% or less than 1%, of cells comprising an indel at any off-target site of the gRNA molecule.

### IX. Delivery/Constructs

[0946] The components, e.g., a Cas9 molecule, gRNA molecule and/or template nucleic acid, or combinations thereof, can be delivered, formulated, or administered in a variety of forms. As a non-limiting example, the gRNA molecule and Cas9 molecule can be formulated (in one or more compositions), directly delivered or administered to a cell in which a genome editing event is desired. Alternatively, nucleic acid encoding one or more components, e.g., a Cas9 molecule or gRNA molecule, or both, can be formulated (in one or more compositions), delivered or administered. In one aspect, the gRNA molecule is provided as DNA encoding the gRNA molecule and the Cas9 molecule is provided as DNA encoding the Cas9 molecule. In one embodiment, the gRNA molecule and Cas9 molecule are encoded on separate nucleic acid molecules. In one embodiment, the gRNA molecule and Cas9 molecule are encoded on the same nucleic acid molecule. In one aspect, the gRNA molecule is provided as RNA and the Cas9 molecule is provided as DNA encoding the Cas9 molecule. In one embodiment, the gRNA molecule is provided with one or more modifications, e.g., as described herein. In one aspect, the gRNA molecule is provided as RNA and the Cas9 molecule is provided as mRNA encoding the Cas9 molecule. In one aspect, the gRNA molecule is provided as RNA and the Cas9 molecule is provided as a protein. In one embodiment, the gRNA and Cas9 molecule are provided as a ribonuclear protein complex (RNP). In one aspect, the gRNA molecule is provided as DNA encoding the gRNA molecule and the Cas9 molecule is provided as a protein. In any of the aforementioned embodiments, the composition may further include a template nucleic acid.

[0947] Delivery may be accomplished by, for example, electroporation (e.g., as known in the art) or other method that renders the cell membrane permeable to nucleic acid and/or polypeptide molecules. Additional techniques for rendering the membrane permeable are known in the art and include, for example, cell squeezing (e.g., as described in WO2015/023982 and WO2013/059343, the contents of which are hereby incorporated by reference in their entirety), nanoneedles (e.g., as described in Chiappini et al., Nat. Mat., 14; 532-39, or US20140295558, the contents of which are hereby incorporated by reference in their entirety) and nanostraws (e.g., as described in Xie, ACS Nano, 7(5); 4351-58, the contents of which are hereby incorporated by reference in their entirety).

[0948] When a component is delivered encoded in DNA the DNA will typically include a control region, e.g., comprising a promoter, to effect expression. Useful promoters for Cas9 molecule sequences include CMV, EF-1 alpha, MSCV, PGK, CAG control promoters. Useful promoters for gRNAs include H1, EF-1a and U6 promoters. Promoters with similar or dissimilar strengths can be selected to tune the expression of components. Sequences encoding a Cas9 molecule can comprise a nuclear localization signal (NLS), e.g., an SV40 NLS. In an embodiment, a promoter for a Cas9 molecule or a gRNA molecule can be, independently, inducible, tissue specific, or cell specific.

DNA-Based Delivery of a Cas9 Molecule and or a gRNA Molecule

[0949] DNA encoding Cas9 molecules and/or gRNA molecules, can be administered to subjects or delivered into cells by art-known methods or as described herein. For example, Cas9-encoding and/or gRNA-encoding DNA can be delivered, e.g., by vectors (e.g., viral or non-viral vectors), non-vector based methods (e.g., using naked DNA or DNA complexes), or a combination thereof.

[0950] In some embodiments, the Cas9- and/or gRNA-encoding DNA is delivered by a vector (e.g., viral vector/virus, plasmid, minicircle or nanoplasmid). In some embodiments, the Cas9- and/or gRNA-encoding DNA is delivered by at least one vector. For example, the Cas9 is delivered by a vector that is different than the vector by which the gRNA-encoding DNA is delivered.

[0951] A vector can comprise a sequence that encodes a Cas9 molecule and/or a gRNA molecule. A vector can also comprise a sequence encoding a signal peptide (e.g., for nuclear localization, nucleolar localization, mitochondrial localization), fused, e.g., to a Cas9 molecule sequence. For example, a vector can comprise one or more nuclear localization sequence (e.g., from SV40) fused to the sequence encoding the Cas9 molecule.

[0952] One or more regulatory/control elements, e.g., a promoter, an enhancer, an intron, a polyadenylation signal, a Kozak consensus sequence, internal ribosome entry sites (IRES), a 2A sequence, and a splice acceptor or donor can be included in the vectors. In some embodiments, the promoter is recognized by RNA polymerase II (e.g., a CMV promoter). In other embodiments, the promoter is recognized by RNA polymerase III (e.g., a U6 promoter). In some embodiments, the promoter is a regulated promoter (e.g., inducible promoter). In other embodiments, the promoter is a constitutive promoter. In some embodiments, the promoter is a tissue specific promoter. In some embodiments, the promoter is a viral promoter. In other embodiments, the promoter is a non-viral promoter.

[0953] In some embodiments, the vector or delivery vehicle is a minicircle. In some embodiments, the vector or delivery vehicle is a nanoplasmid.

[0954] In some embodiments, the vector or delivery vehicle is a viral vector (e.g., for generation of recombinant viruses). In some embodiments, the virus is a DNA virus (e.g., dsDNA or ssDNA virus). In other embodiments, the virus is an RNA virus (e.g., an ssRNA virus).

[0955] Exemplary viral vectors/viruses include, e.g., retroviruses, lentiviruses, adenovirus, adeno-associated virus (AAV), vaccinia viruses, poxviruses, and herpes simplex viruses. Viral vector technology is well known in the art and is described, for example, in Sambrook et al., 2012, MOLECULAR CLONING: A LABORATORY MANUAL, volumes 1-4, Cold Spring Harbor Press, NY), and in other virology and molecular biology manuals.

[0956] In some embodiments, the virus infects dividing cells. In other embodiments, the virus infects non-dividing cells. In some embodiments, the virus infects both dividing and non-dividing cells. In some embodiments, the virus can integrate into the host genome. In some embodiments, the virus is engineered to have reduced immunity, e.g., in human. In some embodiments, the virus is replication-competent. In other embodiments, the virus is replication-defective, e.g., having one or more coding regions for the genes necessary for additional rounds of virion replication and/or packaging replaced with other genes or deleted. In some embodiments, the virus causes transient expression of the Cas9 molecule and/or the gRNA molecule. In other embodiments, the virus causes long-lasting, e.g., at least 1 week, 2 weeks, 1 month, 2 months, 3 months, 6 months. 9 months, 1 year, 2 years, or permanent expression, of the Cas9 molecule and/or the gRNA molecule. The packaging capacity of the viruses may vary, e.g., from at least about 4 kb to at least about 30 kb, e.g., at least about 5 kb, 10 kb, 15 kb, 20 kb, 25 kb, 30 kb, 35 kb, 40 kb, 45 kb, or 50 kb.

[0957] In some embodiments, the Cas9- and/or gRNA-encoding DNA is delivered by a recombinant retrovirus. In some embodiments, the retrovirus (e.g., Moloney murine leukemia vims) comprises a reverse transcriptase, e.g., that allows integration into the host genome. In some embodiments, the retrovirus is replication-competent. In other embodiments, the retrovirus is replication-defective, e.g., having one of more coding regions for the genes necessary for additional rounds of virion replication and packaging replaced with other genes, or deleted.

[0958] In some embodiments, the Cas9- and/or gRNA-encoding DNA is delivered by a recombinant lentivirus. For example, the lentivirus is replication-defective, e.g., does not comprise one or more genes required for viral replication.

[0959] In some embodiments, the Cas9- and/or gRNA-encoding DNA is delivered by a recombinant adenovirus. In some embodiments, the adenovirus is engineered to have reduced immunity in human.

[0960] In some embodiments, the Cas9- and/or gRNA-encoding DNA and/or template nucleic acid is delivered by a recombinant AAV. In some embodiments, the AAV can incorporate its genome into that of a host cell, e.g., a target cell as described herein. In some embodiments, the AAV is a self-complementary adeno-associated virus (scAAV), e.g., a scAAV that packages both strands which anneal together to form double stranded DNA. AAV serotypes that may be used in the disclosed methods include, e.g., AAV1, AAV2, modified AAV2 (e.g., modifications at Y444F, Y500F, Y730F and/or S662V), AAV3, modified AAV3 (e.g., modifications at Y705F, Y731F and/or T492V), AAV4, AAV5, AAV6, modified AAV6 (e.g., modifications at S663V and/or T492V), AAV8, AAV8.2, AAV9, AAVrh10, and pseudotyped AAV, such as AAV2/8, AAV2/5 and AAV2/6 can also be used in the disclosed methods.

[0961] In some embodiments, the Cas9- and/or gRNA-encoding DNA is delivered by a hybrid virus, e.g., a hybrid of one or more of the viruses described herein.

[0962] A packaging cell is used to form a virus particle that is capable of infecting a host or target cell. Such a cell includes a 293 cell, which can package adenovirus, and a ψ2 cell or a PA317 cell, which can package retrovirus. A viral vector used in gene therapy is usually generated by a producer cell line that packages a nucleic acid vector into a viral particle. The vector typically contains the minimal viral sequences required for packaging and subsequent integration into a host or target cell (if applicable), with other viral sequences being replaced by an expression cassette encoding the protein to be expressed. For example, an AAV vector used in gene therapy typically only possesses inverted terminal repeat (ITR) sequences from the AAV genome which are required for packaging and gene expression in the host or target cell. The missing viral functions are supplied in trans by the packaging cell line. Henceforth, the viral DNA is packaged in a cell line, which contains a helper plasmid encoding the other AAV genes, namely rep and cap, but lacking ITR sequences. The cell line is also infected with adenovirus as a helper. The helper virus promotes replication of the AAV vector and expression of AAV genes from the helper plasmid. The helper plasmid is not packaged in significant amounts due to a lack of ITR sequences. Contamination with adenovirus can be reduced by, e.g., heat treatment to which adenovirus is more sensitive than AAV.

[0963] In an embodiment, the viral vector has the ability of cell type and/or tissue type recognition. For example, the viral vector can be pseudotyped with a different/alternative viral envelope glycoprotein; engineered with a cell type-specific receptor (e.g., genetic modification of the viral envelope glycoproteins to incorporate targeting ligands such as a peptide ligand, a single chain antibody, a growth factor); and/or engineered to have a molecular bridge with dual specificities with one end recognizing a viral glycoprotein and the other end recognizing a moiety of the target cell surface (e.g., ligand-receptor, monoclonal antibody, avidin-biotin and chemical conjugation).

[0964] In an embodiment, the viral vector achieves cell type specific expression. For example, a tissue-specific promoter can be constructed to restrict expression of the transgene (Cas9 and gRNA) in only the target cell. The specificity of the vector can also be mediated by microRNA-dependent control of transgene expression. In an embodiment, the viral vector has increased efficiency of fusion of the viral vector and a target cell membrane. For example, a fusion protein such as fusion-competent hemagglutin (HA) can be incorporated to increase viral uptake into cells. In an embodiment, the viral vector has the ability of nuclear localization. For example, a virus that requires the breakdown of the cell wall (during cell division) and therefore will not infect a non-diving cell can be altered to incorporate a nuclear localization peptide in the matrix protein of the virus thereby enabling the transduction of non-proliferating cells.

[0965] In some embodiments, the Cas9- and/or gRNA-encoding DNA is delivered by a non-vector based method (e.g., using naked DNA or DNA complexes). For example, the DNA can be delivered, e.g., by organically modified silica or silicate (Ormosil), electroporation, gene gun, sonoporation, magnetofection, lipid-mediated transfection, dendrimers, inorganic nanoparticles, calcium phosphates, or a combination thereof.

[0966] In some embodiments, the Cas9- and/or gRNA-encoding DNA is delivered by a combination of a vector and a non-vector based method. For example, a virosome comprises a liposome combined with an inactivated virus (e.g., HIV or influenza virus), which can result in more efficient gene transfer, e.g., in a respiratory epithelial cell than either a viral or a liposomal method alone.

[0967] In an embodiment, the delivery vehicle is a non-viral vector. In an embodiment, the non-viral vector is an inorganic nanoparticle (e.g., attached to the payload to the surface of the nanoparticle). Exemplary inorganic nanoparticles include, e.g., magnetic nanoparticles (e.g., Fe lvln0₂), or silica. The outer surface of the nanoparticle can be conjugated with a positively charged polymer (e.g., polyethylenimine, polylysine, polyserine) which allows for attachment (e.g., conjugation or entrapment) of payload. In an embodiment, the non-viral vector is an organic nanoparticle (e.g., entrapment of the payload inside the nanoparticle). Exemplary organic nanoparticles include, e.g., SNALP liposomes that contain cationic lipids together with neutral helper lipids which are coated with polyethylene glycol (PEG) and protamine and nucleic acid complex coated with lipid coating.

[0968] Exemplary lipids and/or polymers for transfer of CRISPR systems or nucleic acid, e.g., vectors, encoding CRISPR systems or components thereof include, for example, those described in WO2011/076807, WO2014/136086, WO2005/060697, WO2014/140211, WO2012/031046, WO2013/103467, WO2013/006825, WO2012/006378, WO2015/095340, and WO2015/095346, the contents of each of the foregoing are hereby incorporated by reference in their entirety. In an embodiment, the vehicle has targeting modifications to increase target cell update of nanoparticles and liposomes, e.g., cell specific antigens, monoclonal antibodies, single chain antibodies, aptamers, polymers, sugars, and cell penetrating peptides. In an embodiment, the vehicle uses fusogenic and endosome-destabilizing peptides/polymers. In an embodiment, the vehicle undergoes acid-triggered conformational changes (e.g., to accelerate endosomal escape of the cargo). In an embodiment, a stimuli-cleavable polymer is used, e.g., for release in a cellular compartment. For example, disulfide-based cationic polymers that are cleaved in the reducing cellular environment can be used.

[0969] In an embodiment, the delivery vehicle is a biological non-viral delivery vehicle. In an embodiment, the vehicle is an attenuated bacterium (e.g., naturally or artificially engineered to be invasive but attenuated to prevent pathogenesis and expressing the transgene (e.g., Listeria monocytogenes, certain Salmonella strains, Bifidobacterium longum, and modified Escherichia coli), bacteria having nutritional and tissue-specific tropism to target specific tissues, bacteria having modified surface proteins to alter target tissue specificity). In an embodiment, the vehicle is a genetically modified bacteriophage (e.g., engineered phages having large packaging capacity, less immunogenic, containing mammalian plasmid maintenance sequences and having incorporated targeting ligands). In an embodiment, the vehicle is a mammalian virus-like particle. For example, modified viral particles can be generated (e.g., by purification of the “empty” particles followed by ex vivo assembly of the virus with the desired cargo). The vehicle can also be engineered to incorporate targeting ligands to alter target tissue specificity. In an embodiment, the vehicle is a biological liposome. For example, the biological liposome is a phospholipid-based particle derived from human cells (e.g., erythrocyte ghosts, which are red blood cells broken down into spherical structures derived from the subject (e.g., tissue targeting can be achieved by attachment of various tissue or cell-specific ligands), or secretory exosomes—subject (i.e., patient) derived membrane-bound nanovesicle (30-100 nm) of endocytic origin (e.g., can be produced from various cell types and can therefore be taken up by cells without the need of for targeting ligands).

[0970] In an embodiment, one or more nucleic acid molecules (e.g., DNA molecules) other than the components of a Cas system, e.g., the Cas9 molecule component and/or the gRNA molecule component described herein, are delivered. In an embodiment, the nucleic acid molecule is delivered at the same time as one or more of the components of the Cas system are delivered. In an embodiment, the nucleic acid molecule is delivered before or after (e.g., less than about 30 minutes, 1 hour, 2 hours, 3 hours, 6 hours, 9 hours, 12 hours, 1 day, 2 days, 3 days, 1 week, 2 weeks, or 4 weeks) one or more of the components of the Cas9 system are delivered. In an embodiment, the nucleic acid molecule is delivered by a different means than one or more of the components of the Cas9 system. e.g., the Cas9 molecule component and/or the gRNA molecule component, are delivered. The nucleic acid molecule can be delivered by any of the delivery methods described herein. For example, the nucleic acid molecule can be delivered by a viral vector, e.g., an integration-deficient lentivirus, and the Cas9 molecule component and/or the gRNA molecule component can be delivered by electroporation, e.g., such that the toxicity caused by nucleic acids (e.g., DNAs) can be reduced. In an embodiment, the nucleic acid molecule encodes a therapeutic protein, e.g., a protein described herein. In an embodiment, the nucleic acid molecule encodes an RNA molecule, e.g., an RNA molecule described herein. Delivery of RNA encoding a Cas9 molecule

[0971] RNA encoding Cas9 molecules (e.g., active Cas9 molecules, inactive Cas9 molecules or inactive Cas9 fusion proteins) and/or gRNA molecules, can be delivered into cells, e.g., target cells described herein, by art-known methods or as described herein. For example, Cas9-encoding and/or gRNA-encoding RNA can be delivered, e.g., by microinjection, electroporation, lipid-mediated transfection, peptide-mediated delivery, or a combination thereof.

### Delivery of Cas9 Proteins

[0972] Cas9 molecules (e.g., active Cas9 molecules, inactive Cas9 molecules or inactive Cas9 fusion proteins) can be delivered into cells by art-known methods or as described herein. For example, Cas9 protein molecules can be delivered, e.g., by microinjection, electroporation, lipid-mediated transfection, peptide-mediated delivery, cell squeezing or abrasion (e.g., by nanoneedles) or a combination thereof. Delivery can be accompanied by DNA encoding a gRNA or by a gRNA.

[0973] In an embodiment the Cas9 molecule, e.g., as described herein, is delivered as a protein and the gRNA molecule is delivered at one or more RNAs (e.g., as a dgRNA or sgRNA, as described herein). In embodiments, the Cas9 protein is complexed with the gRNA molecule prior to delivery to a cell, e.g., as described herein, as a ribonuclear protein complex (“RNP”). In embodiments, the RNP can be delivered into cells, e.g., described herein, by any art-known method, e.g., electroporation. As described herein, and without being bound by theory, it can be preferable to use a gRNA molecule and Cas9 molecule which result in high % editing at the target sequence (e.g., >85%, >90%, >95%, >98%, or >99%) in the target cell, e.g., described herein, even when the concentration of RNP delivered to the cell is reduced. Again, without being bound by theory, delivering a reduced or low concentration of RNP comprising a gRNA molecule that produces a high % editing at the target sequence in the target cell (including at the low RNP concentration), can be beneficial because it may reduce the frequency and number of off-target editing events. In one aspect, where a low or reduced concentration of RNP is to be used, the following procedure can be used to generate the RNP:
[0974] 1. Provide the Cas9 molecule and the tracr in solution at a high concentration (e.g., a concentration higher than the final RNP concentration to be delivered to the cell), and allow the two components to equilibrate;
[0975] 2. Provide the crRNA molecule, and allow the components to equilibrate (thereby forming a high-concentration solution of the RNP);
[0976] 3. Dilute the RNP solution to the desired concentration;
[0977] 4. Deliver said RNP at said desired concentration to the target cells, e.g., by electroporation.

[0978] The above procedure may be modified for use with sgRNA molecules by omitting step 2, above, and in step 1, providing the Cas9 molecule and the sgRNA molecule in solution at high concentration, and allowing the components to equilibrate. In embodiments, the Cas9 molecule and each gRNA component are provided in solution at a 1:2 ratio (Cas9:gRNA), e.g., a 1:2 molar ratio of Cas9:gRNA molecule. Where dgRNA molecules are used, the ratio, e.g., molar ratio, is 1:2:2 (Cas9:tracr:crRNA). In embodiments, the RNP is formed at a concentration of 20 uM or higher, e.g., a concentration from about 20 uM to about 50 uM. In embodiments, the RNP is formed at a concentration of 10 uM or higher, e.g., a concentration from about 10 uM to about 30 uM. In embodiments, the RNP is diluted to a final concentration of 10 uM or less (e.g., a concentration from about 0.01 uM to about 10 uM) in a solution comprising the target cell (e.g., described herein) for delivery to said target cell. In embodiments, the RNP is diluted to a final concentration of 3 uM or less (e.g., a concentration from about 0.01 uM to about 3 uM) in a solution comprising the target cell (e.g., described herein) for delivery to said target cell. In embodiments, the RNP is diluted to a final concentration of 1 uM or less (e.g., a concentration from about 0.01 uM to about 1 uM) in a solution comprising the target cell (e.g., described herein) for delivery to said target cell. In embodiments, the RNP is diluted to a final concentration of 0.3 uM or less (e.g., a concentration from about 0.01 uM to about 0.3 uM) in a solution comprising the target cell (e.g., described herein) for delivery to said target cell. In embodiments, the RNP is provided at a final concentration of about 3 uM in a solution comprising the target cell (e.g., described herein) for delivery to said target cell. In embodiments, the RNP is provided at a final concentration of about 1 uM in a solution comprising the target cell (e.g., described herein) for delivery to said target cell. In embodiments, the RNP is provided at a final concentration of about 0.3 uM in a solution comprising the target cell (e.g., described herein) for delivery to said target cell. In embodiments, the RNP is provided at a final concentration of about 0.1 uM in a solution comprising the target cell (e.g., described herein) for delivery to said target cell. In embodiments, the RNP is provided at a final concentration of about 0.05 uM in a solution comprising the target cell (e.g., described herein) for delivery to said target cell. In embodiments, the RNP is provided at a final concentration of about 0.03 uM in a solution comprising the target cell (e.g., described herein) for delivery to said target cell. In embodiments, the RNP is provided at a final concentration of about 0.01 uM in a solution comprising the target cell (e.g., described herein) for delivery to said target cell.

### X. Methods of Treatment

[0979] The Cas systems, e.g., one or more gRNA molecules and one or more Cas molecules (e.g., Cas9 molecules), described herein are useful for the treatment of disease in a mammal, e.g., in a human. The terms “treat,” “treated,” “treating,” and “treatment,” include the administration of Cas systems, e.g., one or more gRNA molecules and one or more Cas9 molecules, to cells to prevent or delay the onset of the symptoms, complications, or biochemical indicia of a disease, alleviating the symptoms or arresting or inhibiting further development of the disease, condition, or disorder. Treatment may be prophylactic (to prevent or delay the onset of the disease, or to prevent the manifestation of clinical or subclinical symptoms thereof) or therapeutic suppression or alleviation of symptoms after the manifestation of the disease. Treatment can be measured by the therapeutic measures described herein. The methods of “treatment” also include administration of cells altered by the introduction of a Cas system (e.g., one or more gRNA molecules and one or more Cas molecules) into said cells to a subject in order to cure, delay, reverse, reduce the severity of, or ameliorate one or more symptoms of a disease or condition, in order to prolong the health or survival of a subject beyond that expected in the absence of such treatment. For example, “treatment” includes the alleviation of a disease symptom in a subject by at least 5%, 6%, 7%, 8%, 9%, 10%, 11%, 12%, 13%, 14%, 15%, 16%, 17%, 18%, 19%, 20%, 25%, 30%, 35%, 40%, 45%, 50%, 55%, 60%, 65%, 70%, 75%, 80%, 85%, 90%, 95% or more.

### Methods of Treatment/Combination Therapies

[0980] In various embodiments, methods of administering cells to a subject are provided, e.g., T or NK cells, e.g., autologous or allogeneic T cells, e.g., described herein. (e.g., those that express a CAR described herein and/or have been modified to reduce, disrupted, or eliminate expression of at least one molecule that regulates MHC II expression and at least one component of a T cell system). In some embodiments, the cell is generated using the CRISPR methods disclosed herein. Other methods for generating the cells may also be used.

[0981] In one embodiment, the method comprises administering a cell which comprises or which at any time comprised a gRNA molecule as described herein, to a subject. In embodiments, the cell has been altered by the introduction of the gRNA molecule such that the gene comprising sequence complementary to the gRNA molecule targeting domain is altered, such that expression of functional product of that gene is reduced or eliminated relative to an unmodified cell. In embodiments, the cell is further engineered to express a CAR, e.g., as described herein. In embodiments, the cell is an immune effector cell, e.g., an NK cell or T cell. In embodiments, the cell is allogeneic. In embodiments, the cell is autologous.

[0982] In another aspect, the present disclosure provides a method comprising administering a gRNA molecule, e.g., a gRNA molecule described herein, or a cell comprising or which at any time comprised a gRNA molecule, e.g., a gRNA molecule described herein, to a subject in need thereof. In one embodiment, the subject has a disorder described herein, e.g., the subject has cancer, e.g., the subject has a cancer which expresses a target antigen described herein. In one embodiment, the subject is a human.

[0983] In another aspect, the disclosure pertains to a method of treating a subject having a disease associated with expression of a cancer associated antigen as described herein comprising administering to the subject an effective amount of a gRNA molecule, e.g., a gRNA molecule described herein, or a cell comprising or which at any time comprised a gRNA molecule, e.g., a gRNA molecule described herein.

[0984] In yet another aspect, the disclosure features a method of treating a subject having a disease associated with expression of a tumor antigen (e.g., an antigen described herein), comprising administering to the subject an effective amount of a cell, e.g., an immune effector cell (e.g., a population of immune effector cells) comprising or which at any time comprised a gRNA molecule, e.g., a gRNA molecule described herein, further comprising a CAR molecule, wherein the CAR molecule comprises an antigen binding domain, a transmembrane domain, and an intracellular domain, said intracellular domain comprises a costimulatory domain and/or a primary signaling domain, wherein said antigen binding domain binds to the tumor antigen associated with the disease, e.g. a tumor antigen as described herein.

[0985] In a related aspect, the disclosure features a method of treating a subject having a disease associated with expression of a tumor antigen. The method comprises administering to the subject an effective amount of a gRNA molecule, e.g., a gRNA molecule described herein, or a cell comprising or which at any time comprised a gRNA molecule, e.g., a gRNA molecule described herein, in combination with an agent that increases the efficacy of the cell, wherein:
[0986] the agent that increases the efficacy of the immune cell is chosen from one or more of:
[0987] a protein phosphatase inhibitor;
[0988] a kinase inhibitor,
[0989] a cytokine;
[0990] an inhibitor of an immune inhibitory molecule; or
[0991] an agent that decreases the level or activity of a T_{REG} cell.

[0992] In another aspect, the disclosure features a composition comprising an immune effector cell (e.g., a population of immune effector cells) comprising or which at any time comprised a gRNA molecule, e.g., a gRNA molecule described herein, for use in the treatment of a subject having a disease associated with expression of a tumor antigen, e.g., a disorder as described herein.

[0993] In certain embodiments of any of the aforesaid methods or uses, the cell comprising or which at any time comprised a gRNA described herein, has been altered such that the expression of the functional gene product of the gene comprising the target sequence complementary to the gRNA targeting domain has been reduced or abolished. In an embodiment, expression of the functional gene product of the gene comprising the target sequence complementary to the gRNA targeting domain has been abolished. In embodiments, the cell further expresses a CAR, e.g., as described herein. In embodiments the cell is allogeneic. In embodiments, the cell is autologous.

[0994] In certain embodiments of any of the aforesaid methods or uses, the disease associated with a tumor antigen, e.g., a tumor antigen described herein, is selected from a proliferative disease such as a cancer or malignancy or a precancerous condition such as a myelodysplasia, a myelodysplastic syndrome or a preleukemia, or is a non-cancer related indication associated with expression of a tumor antigen described herein. In one embodiment, the disease is a cancer described herein, e.g., a cancer described herein as being associated with a target described herein. In one embodiment, the disease is a hematologic cancer. In one embodiment, the hematologic cancer is leukemia. In one embodiment, the cancer is selected from the group consisting of one or more acute leukemias including but not limited to B-cell acute lymphoid leukemia (BALL), T-cell acute lymphoid leukemia (TALL), acute lymphoid leukemia (ALL), pediatric acute lymphoid leukemia; one or more chronic leukemias including but not limited to chronic myelogenous leukemia (CML), chronic lymphocytic leukemia (CLL); additional hematologic cancers or hematologic conditions including, but not limited to B cell prolymphocytic leukemia, blastic plasmacytoid dendritic cell neoplasm. Burkitt's lymphoma, diffuse large B cell lymphoma, follicular lymphoma, hairy cell leukemia, small cell- or a large cell-follicular lymphoma, malignant lymphoproliferative conditions. MALT lymphoma, mantle cell lymphoma, Marginal zone lymphoma, multiple myeloma, myelodysplasia and myelodysplastic syndrome, non-Hodgkin lymphoma. Hodgkin lymphoma, plasmablastic lymphoma, plasmacytoid dendritic cell neoplasm, Waldenstrom macroglobulinemia, and “preleukemia” which are a diverse collection of hematological conditions united by ineffective production (or dysplasia) of myeloid blood cells, and to disease associated with expression of a tumor antigen described herein include, but not limited to, atypical and/or non-classical cancers, malignancies, precancerous conditions or proliferative diseases expressing a tumor antigen as described herein; and any combination thereof. In one embodiment, the cancer is acute lymphoid leukemia (ALL). In one embodiment, the cancer is pediatric ALL. In one embodiment, the cancer is diffuse large B cell lymphoma. In one embodiment, the cancer is chronic lymphocytic leukemia. In one embodiment, the cancer is follicular lymphoma. In one embodiment, the cancer is Hodgkin lymphoma. In one embodiment, the cancer is non-Hodgkin lymphoma. In another embodiment, the disease associated with a tumor antigen described herein is a solid tumor.

[0995] In certain embodiments, the methods or uses are carried out in combination with an agent that increases the efficacy of the immune effector cell, e.g., an agent as described herein.

[0996] In any of the aforesaid methods or uses, the disease associated with expression of the tumor antigen is selected from the group consisting of a proliferative disease, a precancerous condition, a cancer, and a non-cancer related indication associated with expression of the tumor antigen.

[0997] The cancer can be a hematologic cancer, e.g., a cancer chosen from one or more of chronic lymphocytic leukemia (CLL), acute leukemias, acute lymphoid leukemia (ALL), B-cell acute lymphoid leukemia (B-ALL), T-cell acute lymphoid leukemia (T-ALL), chronic myelogenous leukemia (CML), B cell prolymphocytic leukemia, blastic plasmacytoid dendritic cell neoplasm, Burkitt's lymphoma, diffuse large B cell lymphoma, follicular lymphoma, hairy cell leukemia, small cell- or a large cell-follicular lymphoma, malignant lymphoproliferative conditions, MALT lymphoma, mantle cell lymphoma, marginal zone lymphoma, multiple myeloma, myelodysplasia and myelodysplastic syndrome, non-Hodgkin's lymphoma, Hodgkin's lymphoma, plasmablastic lymphoma, plasmacytoid dendritic cell neoplasm, Waldenstrom macroglobulinemia, or pre-leukemia.

[0998] The cancer can also be chosen from colon cancer, rectal cancer, renal-cell carcinoma, liver cancer, non-small cell carcinoma of the lung, cancer of the small intestine, cancer of the esophagus, melanoma, bone cancer, pancreatic cancer, skin cancer, cancer of the head or neck, cutaneous or intraocular malignant melanoma, uterine cancer, ovarian cancer, rectal cancer, cancer of the anal region, stomach cancer, testicular cancer, uterine cancer, carcinoma of the fallopian tubes, carcinoma of the endometrium, carcinoma of the cervix, carcinoma of the vagina, carcinoma of the vulva, Hodgkin's Disease, non-Hodgkin's lymphoma, cancer of the endocrine system, cancer of the thyroid gland, cancer of the parathyroid gland, cancer of the adrenal gland, sarcoma of soft tissue, cancer of the urethra, cancer of the penis, solid tumors of childhood, cancer of the bladder, cancer of the kidney or ureter, carcinoma of the renal pelvis, neoplasm of the central nervous system (CNS), primary CNS lymphoma, tumor angiogenesis, spinal axis tumor, brain stem glioma, pituitary adenoma, Kaposi's sarcoma, epidermoid cancer, squamous cell cancer, T-cell lymphoma, environmentally induced cancers, combinations of said cancers, and metastatic lesions of said cancers.

[0999] In certain embodiments of the methods or uses described herein, the cell is administered in combination with an agent that increases the efficacy of the immune effector cell, e.g., one or more of a protein phosphatase inhibitor, a kinase inhibitor, a cytokine, an inhibitor of an immune inhibitory molecule; or an agent that decreases the level or activity of a T_{REG} cell.

[1000] In certain embodiments of the methods or uses described herein, the protein phosphatase inhibitor is a SHP-1 inhibitor and/or an SHP-2 inhibitor.

[1001] In other embodiments of the methods or uses described herein, kinase inhibitor is chosen from one or more of a CDK4 inhibitor, a CDK4/6 inhibitor (e.g., palbociclib), a BTK inhibitor (e.g., ibrutinib or RN-486), an mTOR inhibitor (e.g., rapamycin or everolimus (RAD001)), an MNK inhibitor, or a dual P13K/mTOR inhibitor. In one embodiment, the BTK inhibitor does not reduce or inhibit the kinase activity of interleukin-2-inducible kinase (ITK).

[1002] In other embodiments of the methods or uses described herein, the agent that decreases the level or activity of the T_{REG} cells is chosen from cyclophosphamide, anti-GITR antibody, CD25-depletion, or a combination thereof.

[1003] In other embodiments, the agent that inhibits the inhibitory molecule comprises a first polypeptide comprising an inhibitory molecule or a fragment thereof and a second polypeptide that provides a positive signal to the cell, and wherein the first and second polypeptides are expressed on the CAR-containing immune cells, wherein (i) the first polypeptide comprises PD1, PD-L1, CTLA4, TIM-3, LAG3, VISTA, BTLA, TIGIT, LAIR1, CD160, 2B4, TGF beta, CEACAM-1, CEACAM-3, and CEACAM-5 or a fragment thereof; and/or (ii) the second polypeptide comprises an intracellular signaling domain comprising a primary signaling domain and/or a costimulatory signaling domain. In one embodiment, the primary signaling domain comprises a functional domain of CD3 zeta; and/or the costimulatory signaling domain comprises a functional domain of a protein selected from 41BB, CD27 and CD28.

[1004] In other embodiments, cytokine is chosen from IL-7; IL-15; a composition comprising a interleukin-15 (IL-15) polypeptide, a interleukin-15 receptor alpha (IL-15Ra) polypeptide, or a combination of both a IL-15 polypeptide and a IL-15Ra polypeptide e.g., hetIL-15; IL-18; IL-21, or a combination thereof. Exemplary hetIL-15 are heterodimeric non-covalent complexes of IL-15 and IL-15Ra (Admune Therapeutics. LLC). Such hetL-1S is described in, e.g., U.S. Pat. No. 8,124,084, U.S. 2012/0177598, U.S. 2009/0082299, U.S. 2012/0141413, and U.S. 2011/0081311, incorporated herein by reference. hetIL-15 is described in, e.g., U.S. Pat. No. 8,124,084, U.S. 2012/0177598, U.S. 2009/0082299, U.S. 2012/0141413, and U.S. 2011/0081311, incorporated herein by reference. Other exemplary embodiments of hetIL-15 are covalent complexes between an IL-15 polypeptide and an IL-15R (e.g., IL-15Ra) polypeptide.

[1005] In other embodiments, the cell and a second, e.g., any of the combination therapies disclosed herein (e.g., the agent that that increases the efficacy of the cell) are administered substantially simultaneously or sequentially.

[1006] In other embodiments, the cell is administered in combination with a molecule that targets GITR and/or modulates GITR function. In certain embodiments, the molecule targeting GITR and/or modulating GITR function is administered prior to the CAR-expressing cell or population of cells, or prior to apheresis.

[1007] In one embodiment, lymphocyte infusion, for example allogeneic lymphocyte infusion, is used in the treatment of the cancer, wherein the lymphocyte infusion comprises at least one cell, e.g., CAR-expressing cell, of the present disclosure. In one embodiment, autologous lymphocyte infusion is used in the treatment of the cancer, wherein the autologous lymphocyte infusion comprises at least one cell, e.g., CAR-expressing cell described herein.

[1008] In one embodiment, the cell is a T cell and the T cell is diaglycerol kinase (DGK) deficient. In one embodiment, the cell is a T cell and the T cell is Ikaros deficient. In one embodiment, the cell is a T cell and the T cell is both DGK and Ikaros deficient.

[1009] In one embodiment, the method includes administering a cell, as described herein, in combination with an agent which enhances the activity of the cell, wherein the agent is a e.g., cytokine, such as IL-7; IL-15; a composition comprising a interleukin-15 (IL-15) polypeptide, a interleukin-15 receptor alpha (IL-15Ra) polypeptide, or a combination of both a IL-15 polypeptide and a IL-15Ra polypeptide e.g., hetIL-15; IL-18; IL-21; or a combination thereof. The cytokine can be delivered in combination with, e.g., simultaneously or shortly after, administration of the cell. Alternatively, the cytokine can be delivered after a prolonged period of time after administration of the cell, e.g., after assessment of the subject's response to the cell. In one embodiment the cytokine is administered to the subject simultaneously (e.g., administered on the same day) with or shortly after administration (e.g., administered 1 day, 2 days, 3 days, 4 days, 5 days, 6 days, or 7 days after administration) of the cell or population of cells of any of claims 61-80. In other embodiments, the cytokine is administered to the subject after a prolonged period of time (e.g., e.g., at least 2 weeks, 3 weeks, 4 weeks, 6 weeks, 8 weeks, 10 weeks, or more) after administration of the cell or population of cells of any of claims 61-80, or after assessment of the subject's response to the cell.

[1010] In other embodiments, the cells that are further engineered to express a CAR are administered in combination with an agent that ameliorates one or more side effects associated with administration of a cell expressing a CAR molecule. Side effects associated with the CAR-expressing cell can be chosen from cytokine release syndrome (CRS) or hemophagocytic lymphohistiocytosis (HLH).

[1011] In embodiments of any of the aforesaid methods or uses, the cells expressing the CAR molecule are administered in combination with an agent that treats the disease associated with expression of the tumor antigen, e.g., any of the second or third therapies disclosed herein. Additional exemplary combinations include one or more of the following.

[1012] In another embodiment, the cell, e.g., as described herein, can be administered in combination with another agent, e.g., a kinase inhibitor and/or checkpoint inhibitor described herein. In an embodiment, a cell can further express another agent, e.g., an agent which enhances the activity of the cell.

[1013] For example, in one embodiment, the agent that enhances the activity of the cell can be an agent which inhibits an inhibitory molecule.

[1014] In one embodiment, the agent that inhibits the inhibitory molecule is an inhibitory nucleic acid is a dsRNA, a siRNA, or a shRNA.

[1015] In another embodiment, the agent which inhibits an inhibitory molecule, e.g., is a molecule described herein, e.g., an agent that comprises a first polypeptide, e.g., an inhibitory molecule, associated with a second polypeptide that provides a positive signal to the cell, e.g., an intracellular signaling domain described herein. In one embodiment, the agent comprises a first polypeptide, e.g., of an inhibitory molecule, or a fragment thereof (e.g., at least a portion of the extracellular domain of any of these), and a second polypeptide which is an intracellular signaling domain described herein (e.g., comprising a costimulatory domain (e.g., 41BB, CD27 or CD28, e.g., as described herein) and/or a primary signaling domain (e.g., a CD3 zeta signaling domain described herein). In one embodiment, the agent comprises a first polypeptide of PD1 or a fragment thereof (e.g., at least a portion of the extracellular domain of PD1), and a second polypeptide of an intracellular signaling domain described herein (e.g., a CD28 signaling domain described herein and/or a CD3 zeta signaling domain described herein).

[1016] In one embodiment, the cell, e.g., T cell or NK cell, is administered to a subject that has received a previous stem cell transplantation, e.g., autologous stem cell transplantation.

[1017] In one embodiment, the cell, e.g., T cell or NK cells, is administered to a subject that has received a previous dose of melphalan.

[1018] In one embodiment, the cell, is administered in combination with an agent that increases the efficacy of the cell, e.g., an agent described herein.

[1019] In one embodiment, the cells, are administered in combination with a low, immune enhancing dose of an mTOR inhibitor. While not wishing to be bound by theory, it is believed that treatment with a low, immune enhancing, dose (e.g., a dose that is insufficient to completely suppress the immune system but sufficient to improve immune function) is accompanied by a decrease in PD-1 positive T cells or an increase in PD-1 negative cells. PD-1 positive T cells, but not PD-1 negative T cells, can be exhausted by engagement with cells which express a PD-1 ligand, e.g., PD-L1 or PD-L2.

[1020] In an embodiment this approach can be used to optimize the performance of the cells described herein in the subject. While not wishing to be bound by theory, it is believed that, in an embodiment, the performance of endogenous, non-modified immune effector cells, e.g., T cells or NK cells, is improved. While not wishing to be bound by theory, it is believed that, in an embodiment, the performance of a CAR-expressing cell is improved. In other embodiments, cells, e.g., T cells or NK cells, which comprise or will be engineered to comprise a gRNA molecule, can be treated ex vivo by contact with an amount of an mTOR inhibitor that increases the number of PD1 negative immune effector cells, e.g., T cells or increases the ratio of PD1 negative immune effector cells, e.g., T cells PD1 positive immune effector cells, e.g., T cells.

[1021] In an embodiment, administration of a low, immune enhancing, dose of an mTOR inhibitor, e.g., an allosteric inhibitor, e.g., RAD001, or a catalytic inhibitor, is initiated prior to administration of an CAR expressing cell described herein, e.g., T cells or NK cells. In an embodiment, the cells are administered after a sufficient time, or sufficient dosing, of an mTOR inhibitor, such that the level of PD1 negative immune effector cells, e.g., T cells or NK cells, or the ratio of PD1 negative immune effector cells, e.g., T cells/PD1 positive immune effector cells, e.g., T cells, has been, at least transiently, increased.

[1022] In an embodiment, the cell, e.g., T cell or NK cell, to be engineered to comprise a gRNA, is harvested after a sufficient time, or after sufficient dosing of the low, immune enhancing, dose of an mTOR inhibitor, such that the level of PD1 negative immune effector cells, e.g., T cells, or the ratio of PD1 negative immune effector cells, e.g., T cells/PD1 positive immune effector cells, e.g., T cells, in the subject or harvested from the subject has been, at least transiently, increased.

[1023] In one embodiment, the cell is administered in combination with an agent that ameliorates one or more side effect associated with administration of a cell, e.g., an agent described herein.

[1024] In one embodiment, the cell is administered in combination with an agent that treats the disease associated with a cancer associated antigen as described herein, e.g., an agent described herein.

[1025] In one embodiment, the cell is administered at a dose and/or dosing schedule described herein.

[1026] In one embodiment, the subject (e.g., human) receives an initial administration of cells, and one or more subsequent administrations of cells, wherein the one or more subsequent administrations are administered less than 15 days, e.g., 14, 13, 12, 1, 10, 9, 8, 7, 6, 5, 4, 3, or 2 days after the previous administration. In one embodiment, more than one administration of cells are administered to the subject (e.g., human) per week, e.g., 2, 3, or 4 administrations of cells comprising a CAR molecule are administered per week. In one embodiment, the subject (e.g., human subject) receives more than one administration of cells per week (e.g., 2, 3 or 4 administrations per week) (also referred to herein as a cycle), followed by a week of no administration of cells, and then one or more additional administration of cells (e.g., more than one administration of the cells per week) is administered to the subject. In another embodiment, the subject (e.g., human subject) receives more than one cycle of cells, and the time between each cycle is less than 10, 9, 8, 7, 6, 5, 4, or 3 days. In one embodiment, the cells are administered every other day for 3 administrations per week. In one embodiment, the cells are administered for at least two, three, four, five, six, seven, eight or more weeks.

[1027] In one embodiment, the cells are administered as a first line treatment for the disease, e.g., the cancer, e.g., the cancer described herein. In another embodiment, the cells, are administered as a second, third, fourth line treatment for the disease, e.g., the cancer, e.g., the cancer described herein.

[1028] In one embodiment, a population of cells described herein is administered.

[1029] In another aspect, the disclosure pertains to the isolated nucleic acid molecule encoding a gRNA, the gRNA molecule, and the cell comprising or which at any time comprised a gRNA for use as a medicament. In embodiments, the cell comprising or which at any time comprised a gRNA is or will be altered such that expression of the functional product of the gene comprising sequence complementary to the gRNA targeting domain is reduced or abolished.

[1030] In another aspect, the disclosure pertains to the isolated nucleic acid molecule encoding a gRNA, the gRNA molecule, and/or the cell comprising or which at any time comprised a gRNA for use in the treatment of a disease expressing a cancer associated antigen as described herein. In embodiments, the cell comprising or which at any time comprised a gRNA is or will be altered such that expression of the functional product of the gene comprising sequence complementary to the gRNA targeting domain is reduced or abolished.

[1031] In another aspect, the disclosure pertains to the isolated nucleic acid molecule encoding a gRNA, the gRNA molecule, and/or the cell comprising or which at any time comprised a gRNA for use as a medicament in combination with a cytokine, e.g., IL-7; IL-15; a composition comprising a interleukin-15 (IL-15) polypeptide, a interleukin-15 receptor alpha (IL-15Ra) polypeptide, or a combination of both a IL-15 polypeptide and a IL-15Ra polypeptide e.g., hetIL-15; IL-18; and/or IL-21; and/or combinations thereof as described herein. In another aspect, the disclosure pertains to a cytokine described herein for use as a medicament in combination with a cell described herein. In embodiments, the cell comprising or which at any time comprised a gRNA is or will be altered such that expression of the functional product of the gene comprising sequence complementary to the gRNA targeting domain is reduced or abolished.

[1032] In another aspect, the disclosure pertains to the isolated nucleic acid molecule encoding a gRNA, the gRNA molecule, and/or the cell comprising or which at any time comprised a gRNA for use as a medicament in combination with a kinase inhibitor and/or a checkpoint inhibitor as described herein. In another aspect, the disclosure pertains to a kinase inhibitor and/or a checkpoint inhibitor described herein for use as a medicament in combination with a cell comprising or which at any time comprised a gRNA.

[1033] In another aspect, the disclosure features a composition comprising a cell for use in the treatment of a subject having a disease associated with expression of a tumor-supporting antigen, e.g., a disorder as described herein.

[1034] In any of the aforesaid methods or uses, the disease associated with expression of the tumor-supporting antigen is selected from the group consisting of a proliferative disease, a precancerous condition, a cancer, and a non-cancer related indication associated with expression of the tumor-supporting antigen. In an embodiment, the disease associated with a tumor-supporting antigen described herein is a solid tumor.

[1035] In one embodiment of the methods or uses described herein, the cell is administered in combination with another agent. In one embodiment, the agent can be a kinase inhibitor, e.g., a CDK4/6 inhibitor, a BTK inhibitor, an mTOR inhibitor, a MNK inhibitor, or a dual PI3K/mTOR inhibitor, and combinations thereof. In one embodiment, the kinase inhibitor is a CDK4 inhibitor. e.g., a CDK4 inhibitor described herein, e.g., a CD4/6 inhibitor, such as, e.g., 6-Acetyl-8-cyclopentyl-5-methyl-2-(5-piperazin-1-yl-pyridin-2-ylamino)-8H-pyrido[2,3-d]pyrimidin-7-one, hydrochloride (also referred to as palbociclib or PD0332991). In one embodiment, the kinase inhibitor is a BTK inhibitor, e.g., a BTK inhibitor described herein, such as, e.g., ibrutinib. In one embodiment, the kinase inhibitor is an mTOR inhibitor, e.g., an mTOR inhibitor described herein, such as, e.g., rapamycin, a rapamycin analog. OSI-027. The mTOR inhibitor can be, e.g., an mTORC inhibitor and/or an mTORC2 inhibitor, e.g., an mTORC1 inhibitor and/or mTORC2 inhibitor described herein. In one embodiment, the kinase inhibitor is a MNK inhibitor, e.g., a MNK inhibitor described herein, such as, e.g., 4-amino-5-(4-fluoroanilino)-pyrazolo [3,4-d] pyrimidine. The MNK inhibitor can be, e.g., a MNK1a, MNK1b, MNK2a and/or MNK2b inhibitor. The dual PI3K/mTOR inhibitor can be, e.g., PF-04695102.

[1036] In one embodiment of the methods or uses described herein, the kinase inhibitor is a CDK4 inhibitor selected from aloisine A; flavopiridol or HMR-1275, 2-(2-chlorophenyl)-5,7-dihydroxy-8-[(3S,4R)-3-hydroxy-1-methyl-4-piperidinyl]-4-chromenone; crizotinib (PF-02341066; 2-(2-Chlorophenyl)-5,7-dihydroxy-8-[(2R,3S)-2-(hydroxymethyl)-1-methyl-3-pyrrolidinyl]-4H-1-benzopyran-4-one, hydrochloride (P276-00); 1-methyl-5-[[2-[5-(trifluoromethyl)-1H-imidazol-2-yl]-4-pyridinyl]oxy]-N-[4-(trifluoromethyl)phenyl]-1H-benzimidazol-2-amine (RAF265); indisulam (E7070); roscovitine (CYC202); palbociclib (PD0332991); dinaciclib (SCH727965); N-[5-[[(5-tert-butyloxazol-2-yl)methyl]thio]thiazol-2-yl]piperidine-4-carboxamide (BMS 387032); 4-[[9-chloro-7-(2,6-difluorophenyl)-5H-pyrimido[5,4-d][2]benzazepin-2-yl]amino]-benzoic acid (MLN8054); 5-[3-(4,6-difluoro-1H-benzimidazol-2-yl)-1H-indazol-5-yl]-N-ethyl-4-methyl-3-pyridinemethanamine (AG-024322); 4-(2,6-dichlorobenzoylamino)-1H-pyrazole-3-carboxylic acid N-(piperidin-4-yl)amide (AT7519); 4-[2-methyl-1-(1-methylethyl)-1H-imidazol-5-yl]-N-[4-(methylsulfonyl)phenyl]-2-pyrimidinamine (AZD5438); and XL281 (BMS908662).

[1037] In one embodiment of the methods or uses described herein, the kinase inhibitor is a CDK4 inhibitor, e.g., palbociclib (PD0332991), and the palbociclib is administered at a dose of about 50 mg, 60 mg, 70 mg, 75 mg, 80 mg, 90 mg, 100 mg, 105 mg, 110 mg, 115 mg, 120 mg, 125 mg, 130 mg, 135 mg (e.g., 75 mg, 100 mg or 125 mg) daily for a period of time, e.g., daily for 14-21 days of a 28 day cycle, or daily for 7-12 days of a 21 day cycle. In one embodiment, 1, 2, 3, 4, 5, 6, 7, 8, 9, 10, 11, 12 or more cycles of palbociclib are administered.

[1038] In one embodiment of the methods or uses described herein, the kinase inhibitor is a BTK inhibitor selected from ibrutinib (PCI-32765); GDC-0834; RN-486; CGI-560; CGI-1764; HM-71224; CC-292; ONO-4059; CNX-774; and LFM-A13. In one embodiment, the BTK inhibitor does not reduce or inhibit the kinase activity of interleukin-2-inducible kinase (ITK), and is selected from GDC-0834; RN-486; CGI-560; CGI-1764; HM-71224; CC-292; ONO-4059; CNX-774; and LFM-A13.

[1039] In one embodiment of the methods or uses described herein, the kinase inhibitor is a BTK inhibitor, e.g., ibrutinib (PCI-32765), and the ibrutinib is administered at a dose of about 250 mg, 300 mg, 350 mg, 400 mg, 420 mg, 440 mg, 460 mg, 480 mg, 500 mg, 520 mg, 540 mg, 560 mg, 580 mg, 600 mg (e.g., 250 mg, 420 mg or 560 mg) daily for a period of time, e.g., daily for 21 day cycle, or daily for 28 day cycle. In one embodiment, 1, 2, 3, 4, 5, 6, 7, 8, 9, 10, 11, 12 or more cycles of ibrutinib are administered.

[1040] In one embodiment of the methods or uses described herein, the kinase inhibitor is a BTK inhibitor that does not inhibit the kinase activity of ITK, e.g., RN-486, and RN-486 is administered at a dose of about 100 mg, 110 mg, 120 mg, 130 mg, 140 mg, 150 mg, 160 mg, 170 mg, 180 mg, 190 mg, 200 mg, 210 mg, 220 mg, 230 mg, 240 mg, 250 mg (e.g., 150 mg, 200 mg or 250 mg) daily for a period of time, e.g., daily a 28 day cycle. In one embodiment, 1, 2, 3, 4, 5, 6, 7, or more cycles of RN-486 are administered.

[1041] In one embodiment of the methods or uses described herein, the kinase inhibitor is an mTOR inhibitor selected from temsirolimus; ridaforolimus (R,2R,4S)-4-[(2R)-2 [(1R,9S,12S,15R,16E,18R,19R,21R, 23S,24E,26E,28Z,30S,32S,35R)-1,18-dihydroxy-19,30-dimethoxy-15,17,21,23, 29,35-hexamethyl-2,3,10,14,20-pentaoxo-11,36-dioxa-4-azatricyclo[30.3.1.04,9] hexatriaconta-16,24,26,28-tetraen-12-yl]propyl]-2-methoxycyclohexyl dimethylphosphinate, also known as AP23573 and MK8669; everolimus (RAD001); rapamycin (AY22989); simapimod; (5-{2,4-bis[(3S)-3-methylmorpholin-4-yl]pyrido[2,3-d]pyrimidin-7-yl}-2-methoxyphenyl)methanol (AZD8055); 2-amino-8-[trans-4-(2-hydroxyethoxy)cyclohexyl]-6-(6-methoxy-3-pyridinyl)-4-methyl-pyrido[2,3-d]pyrimidin-7(8H)-one (PF04691502); and N2-[1,4-dioxo-4-[[4-(4-oxo-8-phenyl-4H-1-benzopyran-2-yl)morpholinium-4-yl]methoxy]butyl]-L-arginylglycyl-L-α-aspartyl-L-serine inner salt (SF1126) (“L-arginylglycyl-L-α-aspartyl-L-serine” disclosed as SEQ ID NO: 1865); and XL765.

[1042] In one embodiment of the methods or uses described herein, the kinase inhibitor is an mTOR inhibitor, e.g., rapamycin, and the rapamycin is administered at a dose of about 3 mg, 4 mg, 5 mg, 6 mg, 7 mg, 8 mg, 9 mg, 10 mg (e.g., 6 mg) daily for a period of time, e.g., daily for 21 day cycle, or daily for 28 day cycle. In one embodiment, 1, 2, 3, 4, 5, 6, 7, 8, 9, 10, 11, 12 or more cycles of rapamycin are administered. In one embodiment, the kinase inhibitor is an mTOR inhibitor, e.g., everolimus and the everolimus is administered at a dose of about 2 mg, 2.5 mg, 3 mg, 4 mg, 5 mg, 6 mg, 7 mg, 8 mg, 9 mg, 10 mg, 11 mg, 12 mg, 13 mg, 14 mg, 15 mg (e.g., 10 mg) daily for a period of time, e.g., daily for 28 day cycle. In one embodiment, 1, 2, 3, 4, 5, 6, 7, 8, 9, 10, 11, 12 or more cycles of everolimus are administered.

[1043] In one embodiment of the methods or uses described herein, the kinase inhibitor is an MNK inhibitor selected from CGP052088; 4-amino-3-(p-fluorophenylamino)-pyrazolo [3,4-d] pyrimidine (CGP57380); cercosporamide; ETC-1780445-2; and 4-amino-5-(4-fluoroanilino)-pyrazolo [3,4-d]pyrimidine.

[1044] In one embodiment of the methods or uses described herein, the kinase inhibitor is a dual phosphatidylinositol 3-kinase (PI3K) and mTOR inhibitor selected from 2-Amino-8-[trans-4-(2-hydroxyethoxy)cyclohexyl]-6-(6-methoxy-3-pyridinyl)-4-methyl-pyrido[2,3-d]pyrimidin-7(8H)-one (PF-04691502); N-[4-[[4-(Dimethylamino)-1-piperidinyl]carbonyl]phenyl]-N′-[4-(4,6-di-4-morpholinyl-1,3,5-triazin-2-yl)phenyl]urea (PF-05212384, PKI-587); 2-Methyl-2-{4-[3-methyl-2-oxo-8-(quinolin-3-yl)-2,3-dihydro-1H-imidazo[4,5-c]quinolin-1-yl]phenyl}propanenitrile (BEZ-235); apitolisib (GDC-0980, RG7422); 2,4-Difluoro-N-{2-(methyloxy)-5-[4-(4-pyridazinyl)-6-quinolinyl]-3-pyridinyl}benzensulfonamide (GSK2126458); 8-(6-methoxypyridin-3-yl)-3-methyl-1-(4-(piperazin-1-yl)-3-(trifluoromethyl)phenyl)-1H-imidazo[4,5-c]quinolin-2(3H)-one Maleic acid (NVP-BGT226); 3-[4-(4-Morpholinylpyrido[3′, 2′:4,5]furo[3,2-d]pyrimidin-2-yl]phenol (P-103); 5-(9-isopropyl-8-methyl-2-morpholino-9H-purin-6-yl)pyrimidin-2-amine (VS-5584, SB2343); and N-[2-[(3,5-Dimethoxyphenyl)amino]quinoxalin-3-yl]-4-[(4-methyl-3-methoxyphenyl)carbonyl]aminophenylsulfonamide (XL765).

[1045] In one embodiment of the methods or uses described herein, a CAR expressing immune effector cell described herein is administered to a subject in combination with a protein tyrosine phosphatase inhibitor, e.g., a protein tyrosine phosphatase inhibitor described herein. In one embodiment, the protein tyrosine phosphatase inhibitor is an SHP-1 inhibitor, e.g., an SHP-1 inhibitor described herein, such as, e.g., sodium stibogluconate. In one embodiment, the protein tyrosine phosphatase inhibitor is an SHP-2 inhibitor.

[1046] In one embodiment of the methods or uses described herein, the cell is administered in combination with another agent, and the agent is a cytokine. The cytokine can be, e.g., IL-7; IL-15; a composition comprising a interleukin-15 (IL-15) polypeptide, a interleukin-15 receptor alpha (IL-15Ra) polypeptide, or a combination of both a IL-1S polypeptide and a IL-15Ra polypeptide e.g., hetIL-15; IL-18; IL-21; or a combination thereof. In another embodiment, the cell is administered in combination with a checkpoint inhibitor, e.g., a checkpoint inhibitor described herein. For example, in one embodiment, the check point inhibitor inhibits an inhibitory molecule selected from PD-1, PD-L1, CTLA-4, TIM-3, CEACAM (e.g., CEACAM-1, CEACAM-3 and/or CEACAM-5), LAG-3, VISTA, BTLA, TIGIT, LAIR1, CD160, 2B4 and TGF beta.

[1047] In one aspect, the disclosure provides a method of treating a subject, e.g., a subject having a condition described herein, with a cell, e.g., described herein, e.g., a cell which has heterologous nucleic acid sequence, e.g., encoding a CAR (e.g., described herein), stably integrated into the genome at a site at or near the target sequence of a gRNA molecule described herein, e.g., a gRNA molecule comprising a targeting domain listed in Tables 1a-c.

[1048] In any of the embodiments and aspects of the disclosure, including in any of the aforementioned aspects and embodiments, the population of cells may be enriched, for example, during manufacturing, for a particular subset or subpopulation, e.g., for T-cells, e.g., for stem-cell memory-like T cells.

[1049] In another aspect, a method of treating a subject, e.g., reducing or ameliorating, a hyperproliferative condition or disorder (e.g., a cancer), e.g., solid tumor, a soft tissue tumor, or a metastatic lesion, in a subject is provided. As used herein, the term “cancer” is meant to include all types of cancerous growths or oncogenic processes, metastatic tissues or malignantly transformed cells, tissues, or organs, irrespective of histopathologic type or stage of invasiveness. Examples of solid tumors include malignancies, e.g., sarcomas, adenocarcinomas, and carcinomas, of the various organ systems, such as those affecting liver, lung, breast, lymphoid, gastrointestinal (e.g., colon), genitourinary tract (e.g., renal, urothelial cells), prostate and pharynx. Adenocarcinomas include malignancies such as most colon cancers, rectal cancer, renal-cell carcinoma, liver cancer, non-small cell carcinoma of the lung, cancer of the small intestine and cancer of the esophagus. In one embodiment, the cancer is a melanoma, e.g., an advanced stage melanoma. Metastatic lesions of the aforementioned cancers can also be treated or prevented using the methods and compositions disclosed herein. Examples of other cancers that can be treated include bone cancer, pancreatic cancer, skin cancer, cancer of the head or neck, cutaneous or intraocular malignant melanoma, uterine cancer, ovarian cancer, rectal cancer, cancer of the anal region, stomach cancer, testicular cancer, uterine cancer, carcinoma of the fallopian tubes, carcinoma of the endometrium, carcinoma of the cervix, carcinoma of the vagina, carcinoma of the vulva, Hodgkin Disease, non-Hodgkin lymphoma, cancer of the esophagus, cancer of the small intestine, cancer of the endocrine system, cancer of the thyroid gland, cancer of the parathyroid gland, cancer of the adrenal gland, sarcoma of soft tissue, cancer of the urethra, cancer of the penis, chronic or acute leukemias including acute myeloid leukemia, chronic myeloid leukemia, acute lymphoblastic leukemia, chronic lymphocytic leukemia, solid tumors of childhood, lymphocytic lymphoma, cancer of the bladder, cancer of the kidney or ureter, carcinoma of the renal pelvis, neoplasm of the central nervous system (CNS), primary CNS lymphoma, tumor angiogenesis, spinal axis tumor, brain stem glioma, pituitary adenoma, Kaposi's sarcoma, epidermoid cancer, squamous cell cancer, T-cell lymphoma, environmentally induced cancers including those induced by asbestos, and combinations of said cancers. Treatment of metastatic cancers, e.g., metastatic cancers that express PD-L1 (Iwai et al. (2005) Int. Immunol. 17:133-144) can be effected using the antibody molecules described herein.

[1050] Exemplary cancers whose growth can be inhibited include cancers typically responsive to immunotherapy. Non-limiting examples of cancers for treatment include melanoma (e.g., metastatic malignant melanoma), renal cancer (e.g. clear cell carcinoma), prostate cancer (e.g. hormone refractory prostate adenocarcinoma), breast cancer, colon cancer and lung cancer (e.g. non-small cell lung cancer). Additionally, refractory or recurrent malignancies can be treated using the molecules described herein.

[1051] In one aspect, the disclosure pertains to a method of treating cancer in a subject. In one aspect, the cancer associated with expression of a cancer associate antigen as described herein is a hematological cancer. In one aspect, the hematological cancer is a leukemia or a lymphoma. In one aspect, a cancer associated with expression of a cancer associate antigen as described herein includes cancers and malignancies including, but not limited to, e.g., one or more acute leukemias including but not limited to, e.g., B-cell acute Lymphoid Leukemia (“BALL”), T-cell acute Lymphoid Leukemia (“TALL”), acute lymphoid leukemia (ALL); one or more chronic leukemias including but not limited to, e.g., chronic myelogenous leukemia (CML). Chronic Lymphoid Leukemia (CLL). Additional cancers or hematologic conditions associated with expression of a cancer associate antigen as described herein include, but are not limited to, e.g., B cell prolymphocytic leukemia, blastic plasmacytoid dendritic cell neoplasm. Burkitt's lymphoma, diffuse large B cell lymphoma. Follicular lymphoma, Hairy cell leukemia, small cell- or a large cell-follicular lymphoma, malignant lymphoproliferative conditions, MALT lymphoma, mantle cell lymphoma, Marginal zone lymphoma, multiple myeloma, myelodysplasia and myelodysplastic syndrome, non-Hodgkin lymphoma, plasmablastic lymphoma, plasmacytoid dendritic cell neoplasm, Waldenstrom macroglobulinemia, and “preleukemia” which are a diverse collection of hematological conditions united by ineffective production (or dysplasia) of myeloid blood cells, and the like. Further, a disease associated with a cancer associate antigen as described herein expression include, but not limited to, e.g., atypical and/or non-classical cancers, malignancies, precancerous conditions or proliferative diseases associated with expression of a cancer associate antigen as described herein.

[1052] In some embodiments, a cancer that can be treated is multiple myeloma. Generally, myeloma cells are thought to be negative for a cancer associate antigen as described herein expression by flow cytometry. Thus, in some embodiments, a cell further engineered to express a CAR as described herein, e.g., a CD19 CAR or BCMA CAR as described herein, may be used to target myeloma cells. In some embodiments, CARs of the present disclosure therapy can be used in combination with one or more additional therapies, e.g., lenalidomide treatment.

[1053] In various aspects, the immune effector cells (e.g., T cells. NK cells) administered to the patient, or their progeny, persist in the patient for at least four months, five months, six months, seven months, eight months, nine months, ten months, eleven months, twelve months, thirteen months, fourteen month, fifteen months, sixteen months, seventeen months, eighteen months, nineteen months, twenty months, twenty-one months, twenty-two months, twenty-three months, two years, three years, four years, or five years after administration of the T cell or NK cell to the patient.

[1054] The disclosure also includes a type of cellular therapy where immune effector cells (e.g., T cells, NK cells) are further modified, e.g., by in vitro transcribed RNA, to transiently express a chimeric antigen receptor (CAR) and the CAR T cell or NK cell is infused to a recipient in need thereof. The infused cell is able to kill tumor cells in the recipient. Thus, in various aspects, the immune effector cells (e.g., T cells, NK cells) administered to the patient, is present for less than one month, e.g., three weeks, two weeks, one week, after administration of the T cell or NK cell to the patient.

[1055] Without wishing to be bound by any particular theory, the anti-tumor immunity response elicited by the CAR-modified immune effector cells (e.g., T cells, NK cells) may be an active or a passive immune response, or alternatively may be due to a direct vs indirect immune response. In one aspect, the CAR transduced immune effector cells (e.g., T cells, NK cells) exhibit specific proinflammatory cytokine secretion and potent cytolytic activity in response to human cancer cells expressing a cancer associate antigen as described herein, resist soluble a cancer associate antigen as described herein inhibition, mediate bystander killing and mediate regression of an established human tumor. For example, antigen-less tumor cells within a heterogeneous field of a cancer-associated antigen as described herein-expressing tumor may be susceptible to indirect destruction (e.g., destruction of a precursor cell) by a cancer-associated antigen as described herein-redirected immune effector cells (e.g., T cells, NK cells) that has previously reacted against adjacent antigen-positive cancer cells.

[1056] Ex vivo procedures are well known in the art and are discussed more fully below. Briefly, cells are isolated from a mammal (e.g., a human) and genetically modified (i.e., transduced or transfected in vitro) with a gRNA molecule, and optionally, a vector expressing a CAR disclosed herein. The modified cell can be administered to a mammalian recipient to provide a therapeutic benefit. The mammalian recipient may be a human and the cell can be autologous with respect to the recipient. Alternatively, the cells can be allogeneic with respect to the recipient.

[1057] The procedure for ex vivo expansion of hematopoietic stem and progenitor cells is described in U.S. Pat. No. 5,199,942, incorporated herein by reference, can be applied to the cells described herein. Other suitable methods are known in the art, therefore the present disclosure is not limited to any particular method of ex vivo expansion of the cells. Briefly, ex vivo culture and expansion of immune effector cells (e.g., T cells. NK cells) comprises: (1) collecting CD34+ hematopoietic stem and progenitor cells from a mammal from peripheral blood harvest or bone marrow explants; and (2) expanding such cells ex vivo. In addition to the cellular growth factors described in U.S. Pat. No. 5,199,942, other factors such as flt3-L, IL-1, IL-3 and c-kit ligand, can be used for culturing and expansion of the cells.

[1058] Procedures for ex vivo expansion of immune effector cells, e.g., T cells, are described, for example, in WO2015/142675, the contents of which are hereby incorporated by reference in their entirety. Such procedures may be useful when used in conjunction with the methods described herein.

[1059] In addition to using a cell-based vaccine in terms of ex vivo immunization, the present disclosure also provides compositions and methods for in vivo immunization to elicit an immune response directed against an antigen in a patient.

[1060] Generally, the cells activated and expanded as described herein may be utilized in the treatment and prevention of diseases that arise in individuals who are immunocompromised. In particular, the CAR-modified immune effector cells (e.g., T cells. NK cells) are used in the treatment of diseases, disorders and conditions associated with expression of a cancer associate antigen as described herein. In certain aspects, the cells are used in the treatment of patients at risk for developing diseases, disorders and conditions associated with expression of a cancer associate antigen as described herein. Thus, the present disclosure provides methods for the treatment or prevention of diseases, disorders and conditions associated with expression of a cancer associate antigen as described herein comprising administering to a subject in need thereof, a therapeutically effective amount of the CAR-modified immune effector cells (e.g., T cells. NK cells).

[1061] In one aspect the cells, including the cells further engineered to express a CAR, may be used to treat a proliferative disease such as a cancer or malignancy or is a precancerous condition such as a myelodysplasia, a myelodysplastic syndrome or a preleukemia. Further, a disease associated with a cancer associate antigen as described herein expression include, but not limited to, e.g., atypical and/or non-classical cancers, malignancies, precancerous conditions or proliferative diseases expressing a cancer associated antigen as described herein. Non-cancer related indications associated with expression of a cancer associate antigen as described herein include, but are not limited to, e.g., autoimmune disease. (e.g., lupus), inflammatory disorders (allergy and asthma) and transplantation.

[1062] The cells (e.g., T cells, NK cells) may be administered either alone, or as a pharmaceutical composition in combination with diluents and/or with other components such as IL-2 or other cy tokines or cell populations.

### Hematologic Cancer

[1063] Hematological cancer conditions are the types of cancer such as leukemia, lymphoma, and malignant lymphoproliferative conditions that affect blood, bone marrow and the lymphatic system.

[1064] Leukemia can be classified as acute leukemia and chronic leukemia. Acute leukemia can be further classified as acute myelogenous leukemia (AML) and acute lymphoid leukemia (ALL). Chronic leukemia includes chronic myelogenous leukemia (CML) and chronic lymphoid leukemia (CLL). Other related conditions include myelodysplastic syndromes (MDS, formerly known as “preleukemia”) which are a diverse collection of hematological conditions united by ineffective production (or dysplasia) of myeloid blood cells and risk of transformation to AML.

[1065] Lymphoma is a group of blood cell tumors that develop from lymphocytes. Exemplary lymphomas include non-Hodgkin lymphoma and Hodgkin lymphoma.

[1066] The present disclosure also provides methods for inhibiting the proliferation or reducing a cancer associated antigen as described herein-expressing cell population, the methods comprising contacting a population of cells comprising a cancer associated antigen as described herein-expressing cell with a cell (e.g., an NK cell or T cell) further engineered to express a CAR that binds to the a cancer associated antigen as described herein-expressing cell. In a specific aspect, the present disclosure provides methods for inhibiting the proliferation or reducing the population of cancer cells expressing a cancer associated antigen as described herein, the methods comprising contacting a cancer associate antigen as described herein-expressing cancer cell population with a T cell or NK cell further engineered to express a CAR that binds to a cancer associated antigen as described herein-expressing cell. In one aspect, the present disclosure provides methods for inhibiting the proliferation or reducing the population of cancer cells expressing a cancer associated antigen as described herein, the methods comprising contacting a cancer associated antigen as described herein-expressing cancer cell population with a T cell or NK cell further engineered to express a CAR that binds to a cancer associated antigen as described herein-expressing cell. In certain aspects, T cell or NK cell reduces the quantity, number, amount or percentage of cells and/or cancer cells by at least 25%, at least 30%, at least 40%, at least 50%, at least 65%, at least 75%, at least 85%, at least 95%, or at least 99% in a subject with or animal model for myeloid leukemia or another cancer associated with a cancer associated antigen as described herein-expressing cells relative to a negative control. In one aspect the subject is a human.

[1067] The present disclosure also provides methods for preventing, treating and/or managing a disease associated with a cancer associated antigen as described herein-expressing cells (e.g., a hematologic cancer or atypical cancer expressing a cancer associated antigen as described herein), the methods comprising administering to a subject in need a T cell or NK cell, including those further engineered to express a CAR that binds to a cancer associated antigen as described herein-expressing cell. In one aspect, the subject is a human. Non-limiting examples of disorders associated with a cancer associated antigen as described herein-expressing cells include autoimmune disorders (such as lupus), inflammatory disorders (such as allergies and asthma) and cancers (such as hematological cancers or atypical cancers expressing a cancer associated antigen as described herein).

[1068] The present disclosure also provides methods for preventing, treating and/or managing a disease associated with a cancer associated antigen as described herein-expressing cells, the methods comprising administering to a subject in need a T cell or NK cell, including those further engineered to express a CAR that binds to a cancer associated antigen as described herein-expressing cell. In one aspect, the subject is a human.

[1069] The present disclosure provides methods for preventing relapse of cancer associated with a cancer associated antigen as described herein-expressing cells, the methods comprising administering to a subject in need thereof a T cell or NK cell, including those further engineered to express a CAR that binds to a cancer associated antigen as described herein-expressing cell. In one aspect, the methods comprise administering cell in combination with an effective amount of another therapy.

### Pharmaceutical Compositions and Treatments

[1070] Pharmaceutical compositions disclosed herein may comprise a cell, e.g., a plurality of cells, as described herein, in combination with one or more pharmaceutically or physiologically acceptable carriers, diluents or excipients. Such compositions may comprise buffers such as neutral buffered saline, phosphate buffered saline and the like; carbohydrates such as glucose, mannose, sucrose or dextran, mannitol; proteins; polypeptides or amino acids such as glycine; antioxidants; chelating agents such as EDTA or glutathione adjuvants (e.g., aluminium hydroxide); and preservatives. Compositions described herein are in one aspect formulated for intravenous administration.

[1071] Pharmaceutical compositions disclosed herein may comprise a nucleic acid, e.g., a gRNA or a vector as disclosed herein, in combination with one or more pharmaceutically or physiologically acceptable carriers, diluents or excipients.

[1072] Pharmaceutical compositions of the present described herein may be administered in a manner appropriate to the disease to be treated (or prevented). The quantity and frequency of administration will be determined by such factors as the condition of the patient, and the type and severity of the patient's disease, although appropriate dosages may be determined by clinical trials.

[1073] In one embodiment, the pharmaceutical composition is substantially free of, e.g., there are no detectable levels of a contaminant, e.g., selected from the group consisting of endotoxin, mycoplasma, replication competent lentivirus (RCL), p24, VSV-G nucleic acid, HIV gag, residual anti-CD3/anti-CD28 coated beads, mouse antibodies, pooled human serum, bovine serum albumin, bovine serum, culture media components, vector packaging cell or plasmid components, a bacterium and a fungus. In one embodiment, the bacterium is at least one selected from the group consisting of Alcaligenes faecalis, Candida albicans, Escherichia coli, Haemophilus influenza, Neisseria meningitides, Pseudomonas aeruginosa, Staphylococcus aureus, Streptococcus pneumonia, and Streptococcus pyogenes group A.

[1074] When “an immunologically effective amount,” “an anti-tumor effective amount,” “a tumor-inhibiting effective amount,” or “therapeutic amount” is indicated, the precise amount of the compositions to be administered can be determined by a physician with consideration of individual differences in age, weight, tumor size, extent of infection or metastasis, and condition of the patient (subject). It can generally be stated that a pharmaceutical composition comprising the immune effector cells (e.g., T cells, NK cells) described herein may be administered at a dosage of 10⁴ to 10⁹ cells/kg body weight, in some instances 10⁵ to 10⁶ cells/kg body weight, including all integer values within those ranges. T cell compositions may also be administered multiple times at these dosages. The cells can be administered by using infusion techniques that are commonly known in immunotherapy (sec, e.g., Rosenberg et al., New Eng. J. of Med. 319:1676, 1988).

[1075] In certain aspects, it may be desired to administer activated immune effector cells (e.g., T cells, NK cells) to a subject and then subsequently redraw blood (or have an apheresis performed), activate immune effector cells (e.g., T cells. NK cells) therefrom according to the present disclosure, and reinfuse the patient with these activated and expanded immune effector cells (e.g., T cells, NK cells). This process can be carried out multiple times every few weeks. In certain aspects, immune effector cells (e.g., T cells, NK cells) can be activated from blood draws of from 10 cc to 400 cc. In certain aspects, immune effector cells (e.g., T cells, NK cells) are activated from blood draws of 20 cc, 30 cc, 40 cc, 50 cc, 60 cc, 70 cc, 80 cc, 90 cc, or 100 cc.

[1076] The administration of the subject compositions may be carried out in any convenient manner, including by aerosol inhalation, injection, ingestion, transfusion, implantation or transplantation. The compositions described herein may be administered to a patient trans arterially, subcutaneously, intradermally, intratumorally, intranodally, intramedullary, intramuscularly, by intravenous (i.v.) injection, or intraperitoneally. In one aspect, the T cell compositions described herein are administered to a patient by intradermal or subcutaneous injection. In one aspect, the T cell compositions described herein are administered by i.v. injection. The compositions of immune effector cells (e.g., T cells, NK cells) may be injected directly into a tumor, lymph node, or site of infection.

[1077] In a particular exemplary aspect, subjects may undergo leukapheresis, wherein leukocytes are collected, enriched, or depleted ex vivo to select and/or isolate the cells of interest, e.g., T cells. These T cell isolates may be expanded by methods known in the art and treated as described herein thereby creating a T cell. Subjects in need thereof may subsequently undergo standard treatment with high dose chemotherapy followed by peripheral blood stem cell transplantation. In certain aspects, following or concurrent with the transplant, subjects receive an infusion of the expanded T cells. In an additional aspect, expanded cells are administered before or following surgery.

[1078] The dosage of the above treatments to be administered to a patient will vary with the precise nature of the condition being treated and the recipient of the treatment. The scaling of dosages for human administration can be performed according to art-accepted practices. The dose for CAMPATH, for example, will generally be in the range 1 to about 100 mg for an adult patient, usually administered daily for a period between 1 and 30 days. The preferred daily dose is 1 to 10 mg per day although in some instances larger doses of up to 40 mg per day may be used (described in U.S. Pat. No. 6,120,766).

[1079] In one aspect. CAR-expressing cells are generated using lentiviral viral vectors, such as lentivirus. Cells, e.g., CARTs, generated that way will have stable CAR expression.

[1080] In one aspect, CAR-expressing cells, e.g., CARTs, are generated using a viral vector such as a gammaretroviral vector, e.g., a gammaretroviral vector described herein. CARTs generated using these vectors can have stable CAR expression.

[1081] In one aspect, CARTs transiently express CAR vectors for 4, 5, 6, 7, 8, 9, 10, 11, 12, 13, 14, 15 days after transduction. Transient expression of CARs can be effected by RNA CAR vector delivery. In one aspect, the CAR RNA is transduced into the T cell by electroporation.

[1082] A potential issue that can arise in patients being treated using transiently expressing CAR immune effector cells (e.g., T cells, NK cells) (particularly with murine scFv bearing CARTs) is anaphylaxis after multiple treatments.

[1083] Without being bound by this theory, it is believed that such an anaphylactic response might be caused by a patient developing humoral anti-CAR response, i.e., anti-CAR antibodies having an anti-IgE isotype. It is thought that a patient's antibody producing cells undergo a class switch from IgG isotype (that does not cause anaphylaxis) to IgE isotype when there is a ten to fourteen day break in exposure to antigen.

[1084] If a patient is at high risk of generating an anti-CAR antibody response during the course of transient CAR therapy (such as those generated by RNA transductions), CART infusion breaks should not last more than ten to fourteen days.

### Methods of Making Modified CAR-Expressing Cells

[1085] In an embodiment, the disclosure pertains to a method of making a cell (e.g., an immune effector cell or population thereof) comprising introducing into (e.g., transducing) a cell a gRNA molecule to a molecule that regulates the expression of MHC II, e.g., a gRNA molecule comprising a targeting domain listed in Tables 1a-c and introducing into said cell template nucleic acid comprising sequence encoding a CAR (e.g., as described herein). In embodiments, the sequence encoding the CAR is integrated into the genome at or near the target sequence of the gRNA molecule. In embodiments, the heterologous nucleic acid sequence integrated or near said site does not comprise an element of a lentiviral vector (e.g., does not comprise a cPPT or CPT element).

[1086] In another aspect, the disclosure pertains to a method of making a cell (e.g., an immune effector cell or population thereof) comprising introducing into (e.g., transducing) a cell, e.g., a T cell or a NK cell described herein, with a vector of comprising a nucleic acid encoding a CAR, e.g., a CAR described herein; or a nucleic acid encoding a CAR molecule e.g., a CAR described herein.

[1087] The cell in the methods is an immune effector cell (e.g., a T cell or a NK cell, or a combination thereof). In some embodiments, the cell in the methods is diaglycerol kinase (DGK) and/or Ikaros deficient.

[1088] In some embodiments, the introducing the nucleic acid molecule encoding a CAR comprises transducing a vector comprising the nucleic acid molecule encoding a CAR, or transfecting the nucleic acid molecule encoding a CAR, wherein the nucleic acid molecule is an in vitro transcribed RNA.

[1089] In some embodiments, the method further comprises:
[1090] a) providing a population of immune effector cells (e.g., T cells or NK cells); and
[1091] b) removing T regulatory cells from the population, thereby providing a population of T regulatory-depleted cells;
[1092] wherein steps a) and b) are performed prior to introducing the nucleic acid encoding the CAR and/or CRISPR system to the population.

[1093] In embodiments of the methods, the T regulatory cells comprise CD25+ T cells, and are removed from the cell population using an anti-CD25 antibody, or fragment thereof. The anti-CD25 antibody, or fragment thereof, can be conjugated to a substrate, e.g., a bead.

[1094] In other embodiments, the population of T regulatory-depleted cells provided from step (b) contains less than 30%, 25%, 20%, 15%, 10%, 5%, 4%, 3%, 2%, 1% of CD25+ cells.

[1095] In yet other embodiments, the method further comprises removing cells from the population which express a tumor antigen that does not comprise CD25 to provide a population of T regulatory-depleted and tumor antigen depleted cells prior to introducing the nucleic acid encoding a CAR to the population. The tumor antigen can be selected from CD19, CD30, CD38, CD123, CD20, CD14 or CD11b, or a combination thereof.

[1096] In other embodiments, the method further comprises removing cells from the population which express a checkpoint inhibitor, to provide a population of T regulatory-depleted and inhibitory molecule depleted cells prior to introducing the nucleic acid encoding a CAR or CRISPR system to the population. The checkpoint inhibitor can be chosen from PD-1, LAG-3, TIM3, B7-H1, CD160, P1H, 2B4, CEACAM (e.g., CEACAM-1, CEACAM-3, and/or CEACAM-5), TIGIT, CTLA-4, BTLA, and LAIR1.

[1097] Further embodiments disclosed herein encompass providing a population of immune effector cells. The population of immune effector cells provided can be selected based upon the expression of one or more of CD3, CD28, CD4, CD8, CD45RA, and/or CD45RO. In certain embodiments, the population of immune effector cells provided are CD3+ and/or CD28+.

[1098] In certain embodiments of the method, the method further comprises expanding the population of cells after the nucleic acid molecule encoding a CAR has been introduced.

[1099] In embodiments, the population of cells is expanded for a period of 8 days or less.

[1100] In certain embodiments, the population of cells is expanded in culture for 5 days, and the resulting cells are more potent than the same cells expanded in culture for 9 days under the same culture conditions.

[1101] In other embodiments, the population of cells is expanded in culture for 5 days show at least a one, two, three or four fold increase in cell doublings upon antigen stimulation as compared to the same cells expanded in culture for 9 days under the same culture conditions.

[1102] In yet other embodiments, the population of cells is expanded in culture for 5 days, and the resulting cells exhibit higher proinflammatory IFN-γ and/or GM-CSF levels, as compared to the same cells expanded in culture for 9 days under the same culture conditions.

[1103] In other embodiments, the population of cells is expanded by culturing the cells in the presence of an agent that stimulates a CD3/TCR complex associated signal and/or a ligand that stimulates a costimulatory molecule on the surface of the cells. The agent can be a bead conjugated with anti-CD3 antibody, or a fragment thereof, and/or anti-CD28 antibody, or a fragment thereof.

[1104] In other embodiments, the population of cells is expanded in an appropriate media that includes one or more interleukin that result in at least a 200-fold, 250-fold, 300-fold, or 350-fold increase in cells over a 14 day expansion period, as measured by flow cytometry.

[1105] In other embodiments, the population of cells is expanded in the presence IL-15 and/or IL-7.

[1106] In certain embodiments, the method further includes cryopreserving the population of the cells after the appropriate expansion period.

[1107] In yet other embodiments, the method of making disclosed herein further comprises contacting the population of immune effector cells with a nucleic acid encoding a telomerase subunit. e.g., hTERT. The nucleic acid encoding the telomerase subunit can be DNA.

[1108] The disclosure also provides a method of generating a population of RNA-engineered cells, e.g., cells described herein, e.g., immune effector cells (e.g., T cells, NK cells), transiently expressing exogenous RNA. The method comprises introducing an in vitro transcribed RNA or synthetic RNA into a cell, where the RNA comprises a nucleic acid encoding a CAR molecule described herein.

[1109] In another aspect, the disclosure pertains to a method of providing an anti-tumor immunity in a subject comprising administering to the subject an effective amount of a cell comprising a CAR molecule, e.g., a cell expressing a CAR molecule described herein. In one embodiment, the cell is an autologous T cell or NK cell. In one embodiment, the cell is an allogeneic T cell or NK cell. In one embodiment, the subject is a human.

[1110] In one aspect, the disclosure includes a population of autologous cells that are transfected or transduced with a vector comprising a nucleic acid molecule encoding a CAR molecule, e.g., as described herein. In one embodiment, the vector is a retroviral vector. In one embodiment, the vector is a self-inactivating lentiviral vector as described elsewhere herein. In one embodiment, the vector is delivered (e.g., by transfecting or electroporating) to a cell, e.g., a T cell or a NK cell, wherein the vector comprises a nucleic acid molecule encoding a CAR as described herein, which is transcribed as an mRNA molecule, and the CARs is translated from the RNA molecule and expressed on the surface of the cell.

[1111] In another aspect, the disclosure provides a population of CAR-expressing cells, e.g., CAR-expressing immune effector cells (e.g., T cells or NK cells). In some embodiments, the population of CAR-expressing cells comprises a mixture of cells expressing different CARs. For example, in one embodiment, the population of CAR-expressing immune effector cells (e.g., T cells or NK cells) can include a first cell expressing a CAR having an antigen binding domain that binds to a first tumor antigen as described herein, and a second cell expressing a CAR having a different antigen binding domain that binds to a second tumor antigen as described herein. As another example, the population of CAR-expressing cells can include a first cell expressing a CAR that includes an antigen binding domain that binds to a tumor antigen as described herein, and a second cell expressing a CAR that includes an antigen binding domain to a target other than a tumor antigen as described herein. In one embodiment, the population of CAR-expressing cells includes, e.g., a first cell expressing a CAR that includes a primary intracellular signaling domain, and a second cell expressing a CAR that includes a secondary signaling domain, e.g., a costimulatory signaling domain.

[1112] In another aspect, the disclosure provides a population of cells wherein at least one cell in the population expresses a CAR having an antigen binding domain that binds to a tumor antigen as described herein, and a second cell expressing another agent, e.g., an agent which enhances the activity of a CAR-expressing cell. For example, in one embodiment, the agent can be an agent which inhibits an inhibitory molecule. Examples of inhibitory molecules include PD-1, PD-L1, CTLA-4, TIM-3, CEACAM (e.g., CEACAM-1, CEACAM-3 and/or CEACAM-5), LAG-3, VISTA, BTLA, TIGIT, LAIR1, CD160, 2B4 and TGF beta. In one embodiment, the agent which inhibits an inhibitory molecule, e.g., is a molecule described herein, e.g., an agent that comprises a first polypeptide, e.g., an inhibitory molecule, associated with a second polypeptide that provides a positive signal to the cell, e.g., an intracellular signaling domain described herein. In one embodiment, the agent comprises a first polypeptide, e.g., of an inhibitory molecule such as PD-1, LAG-3, CTLA-4, CD160, BTLA, LAIR1, TIM-3, CEACAM (e.g., CEACAM-1, CEACAM-3 and/or CEACAM-5), 2B4 and TIGIT, or a fragment of any of these, and a second polypeptide which is an intracellular signaling domain described herein (e.g., comprising a costimulatory domain (e.g., 41BB, CD27 or CD28, e.g., as described herein) and/or a primary signaling domain (e.g., a CD3 zeta signaling domain described herein). In one embodiment, the agent comprises a first polypeptide of PD-1 or a fragment thereof, and a second polypeptide of an intracellular signaling domain described herein (e.g., a CD28, CD27, OX40 or 4-IBB signaling domain described herein and/or a CD3 zeta signaling domain described herein).

[1113] In one embodiment, the nucleic acid molecule encoding a CAR molecule, e.g., as described herein, is expressed as an mRNA molecule. In one embodiment, the genetically modified CAR-expressing cells, e.g., immune effector cells (e.g., T cells. NK cells), can be generated by transfecting or electroporating an RNA molecule encoding the desired CARs (e.g., without a vector sequence) into the cell. In one embodiment, a CAR molecule is translated from the RNA molecule once it is incorporated and expressed on the surface of the recombinant cell.

[1114] A method for generating mRNA for use in transfection involves in vitro transcription (IVT) of a template with specially designed primers, followed by polyA addition, to produce a construct containing 3′ and 5′ untranslated sequence (“UTR”) (e.g., a 3′ and/or 5′ UTR described herein), a 5′ cap (e.g., a 5′ cap described herein) and/or Internal Ribosome Entry Site (IRES) (e.g., an IRES described herein), the nucleic acid to be expressed, and a polyA tail, typically 50-2000 bases in length. RNA so produced can efficiently transfect different kinds of cells. In one embodiment, the template includes sequences for the CAR. In an embodiment, an RNA CAR vector is transduced into a cell, e.g., a T cell or a NK cell, by electroporation.

### XI. Methods of Manufacture

[1115] The disclosure provides methods of manufacturing cells, e.g., T cells, e.g., allogeneic T cells, e.g., CAR-engineered cells modified, or to be modified, with the gRNA molecules described herein.

[1116] The disclosure comprises cells, e.g., immune effector cells, e.g., allogeneic or autologous cells, which comprise, or at one time comprised, one or more gRNA molecules as described herein. The CRISPR systems described herein may be introduced into the cells by any of the methods described herein. The cells may further be engineered to express a CAR as described herein.

[1117] In one aspect, the disclosure provides a method for making a cell comprising:
[1118] a) introducing a gRNA molecule, or nucleic acid encoding said gRNA molecule, e.g., as described herein (e.g., comprising a targeting domain comprising a sequence complementary to a target sequence within a region specified in Table 3 or e.g., comprising a targeting domain listed in Tables 1a-c) into said cell;
[1119] b) introducing a Cas9 molecule as described herein, or nucleic acid encoding said Cas9 molecule, into said cell;
[1120] c) introducing nucleic acid encoding a CAR into said cell (e.g., a template nucleic acid comprising sequence encoding a CAR); and
[1121] d) expanding and activating the cells.

[1122] In embodiments, steps a), b) and c) occur together (e.g., are performed in one step, e.g., the gRNA molecule and the Cas9 protein are introduced as a ribonuclear protein (RNP) complex and the template nucleic acid are introduced together, e.g., by electroporation). In embodiments, the introduction of a) and b) (e.g., by electroporation of an RNP) occur before steps c) (e.g., via a transfection) and d). In embodiments, the introduction of c) (e.g., via transfection) occurs before the introduction of a) and b) (e.g., by electroporation of an RNP). In embodiments, the introduction of c) and the expanding and activating of d) occurs before the introduction of a) and b). In embodiments, the method further comprises e) selecting the cells which are CAR-expressing. In embodiments, the method further comprises f) selecting the cells which have reduced or eliminated function or expression of the gene targeted by the gRNA molecule of step a). For example, if the gRNA molecule comprises a targeting domain complementary to a target sequence in a molecule that regulates the expression of MHC II (e.g., comprises a targeting domain comprising, e.g., consisting of, a sequence listed in Tables 1a-c, insertion of the nucleic acid sequence encoding the CAR may occur at or near the target sequence of the gRNA molecule of step a), and the cell may have reduced function, e.g., catalytic function, of a molecule that regulates the expression of MHC II. In some embodiments, the cell may have reduced expression and/or function of MHC II.

### Expansion and Activation of Cells

[1123] Immune effector cells such as T cells may be activated and expanded generally using methods as described, for example, in U.S. Pat. Nos. 6,352,694; 6,534,055; 6,905,680; 6,692,964; 5,858,358; 6,887,466; 6,905,681; 7,144,575; 7,067,318; 7,172,869; 7,232,566; 7,175,843; 5,883,223; 6,905,874; 6,797,514; 6,867,041; and U.S. Patent Application Publication No. 20060121005, each of which is incorporated by reference in its entirety.

[1124] Generally, a population of immune effector cells e.g., T regulatory cell depleted cells, may be expanded by contact with a surface having attached thereto an agent that stimulates a CD3/TCR complex associated signal and a ligand that stimulates a costimulatory molecule on the surface of the T cells. In particular, T cell populations may be stimulated as described herein, such as by contact with an anti-CD3 antibody, or antigen-binding fragment thereof, or an anti-CD2 antibody immobilized on a surface, or by contact with a protein kinase C activator (e.g., bryostatin) in conjunction with a calcium ionophore. For co-stimulation of an accessory molecule on the surface of the T cells, a ligand that binds the accessory molecule is used. For example, a population of T cells can be contacted with an anti-CD3 antibody and an anti-CD28 antibody, under conditions appropriate for stimulating proliferation of the T cells. To stimulate proliferation of either CD4+ T cells or CD8+ T cells, an anti-CD3 antibody and an anti-CD28 antibody can be used. Examples of an anti-CD28 antibody include 9.3, B-T3, XR-CD28 (Diaclone, Besançon, France) can be used as can other methods commonly known in the art (Berg et al., Transplant Proc. 30(8):3975-3977, 1998; Haanen et al., J. Exp. Med. 190(9):13191328, 1999; Garland et al., J. Immunol Meth. 227(1-2):53-63, 1999).

[1125] In embodiments in which the cells have reduced or absent levels of expression or levels of a component of the TCR, activation may be achieved through means other than interaction with CD3. In cells which further express a CAR, activation may be achieved by contacting said cells with the antigen bound by the antigen-binding domain of the CAR, or a fragment thereof capable of binding the CAR. Such antigen or fragment thereof may be present on, for example, an antibody scaffold, a cell (e.g., an antigen presenting cell, e.g., a cell which naturally expresses said antigen or one which has been artificially engineered to express said antigen on its cell surface), or a solid support such as a bead or membrane.

[1126] In certain aspects, the primary stimulatory signal and the costimulatory signal for the T cell may be provided by different protocols. For example, the agents providing each signal may be in solution or coupled to a surface. When coupled to a surface, the agents may be coupled to the same surface (i.e., in “cis” formation) or to separate surfaces (i.e., in “trans” formation). Alternatively, one agent may be coupled to a surface and the other agent in solution. In one aspect, the agent providing the costimulatory signal is bound to a cell surface and the agent providing the primary activation signal is in solution or coupled to a surface. In certain aspects, both agents can be in solution. In one aspect, the agents may be in soluble form, and then cross-linked to a surface, such as a cell expressing Fc receptors or an antibody or other binding agent which will bind to the agents. In this regard, see for example, U.S. Patent Application Publication Nos. 20040101519 and 20060034810 for artificial antigen presenting cells (aAPCs) that are contemplated for use in activating and expanding T cells.

[1127] In one aspect, the two agents are immobilized on beads, either on the same bead, i.e., “cis,” or to separate beads, i.e., “trans.” By way of example, the agent providing the primary activation signal is an anti-CD3 antibody or an antigen-binding fragment thereof and the agent providing the costimulatory signal is an anti-CD28 antibody or antigen-binding fragment thereof; and both agents are co-immobilized to the same bead in equivalent molecular amounts. In one aspect, a 1:1 ratio of each antibody bound to the beads for CD4+ T cell expansion and T cell growth is used. In certain aspects, a ratio of anti CD3:CD28 antibodies bound to the beads is used such that an increase in T cell expansion is observed as compared to the expansion observed using a ratio of 1:1. In one particular aspect an increase of from about 1 to about 3 fold is observed as compared to the expansion observed using a ratio of 1:1. In one aspect, the ratio of CD3:CD28 antibody bound to the beads ranges from 100:1 to 1:100 and all integer values there between. In one aspect, more anti-CD28 antibody is bound to the particles than anti-CD3 antibody, i.e., the ratio of CD3:CD28 is less than one. In certain aspects, the ratio of anti CD28 antibody to anti CD3 antibody bound to the beads is greater than 2:1. In one particular aspect, a 1:100 CD3:CD28 ratio of antibody bound to beads is used. In one aspect, a 1:75 CD3:CD28 ratio of antibody bound to beads is used. In a further aspect, a 1:50 CD3:CD28 ratio of antibody bound to beads is used. In one aspect, a 1:30 CD3:CD28 ratio of antibody bound to beads is used. In one preferred aspect, a 1:10 CD3:CD28 ratio of antibody bound to beads is used. In one aspect, a 1:3 CD3:CD28 ratio of antibody bound to the beads is used. In yet one aspect, a 3:1 CD3:CD28 ratio of antibody bound to the beads is used.

[1128] Ratios of particles to cells from 1:500 to 500:1 and any integer values in between may be used to stimulate T cells or other target cells. As those of ordinary skill in the art can readily appreciate, the ratio of particles to cells may depend on particle size relative to the target cell. For example, small sized beads could only bind a few cells, while larger beads could bind many. In certain aspects the ratio of cells to particles ranges from 1:100 to 100:1 and any integer values in-between and in further aspects the ratio comprises 1:9 to 9:1 and any integer values in between, can also be used to stimulate T cells. The ratio of anti-CD3- and anti-CD28-coupled particles to T cells that result in T cell stimulation can vary as noted above, however certain preferred values include 1:100, 1:50, 1:40, 1:30, 1:20, 1:10, 1:9, 1:8, 1:7, 1:6, 1:5, 1:4, 1:3, 1:2, 1:1, 2:1, 3:1, 4:1, 5:1, 6:1, 7:1, 8:1, 9:1, 10:1, and 15:1 with one preferred ratio being at least 1:1 particles per T cell. In one aspect, a ratio of particles to cells of 1:1 or less is used. In one particular aspect, a preferred particle: cell ratio is 1:5. In further aspects, the ratio of particles to cells can be varied depending on the day of stimulation. For example, in one aspect, the ratio of particles to cells is from 1:1 to 10:1 on the first day and additional particles are added to the cells every day or every other day thereafter for up to 10 days, at final ratios of from 1:1 to 1:10 (based on cell counts on the day of addition). In one particular aspect, the ratio of particles to cells is 1:1 on the first day of stimulation and adjusted to 1:5 on the third and fifth days of stimulation. In one aspect, particles are added on a daily or every other day basis to a final ratio of 1:1 on the first day, and 1:5 on the third and fifth days of stimulation. In one aspect, the ratio of particles to cells is 2:1 on the first day of stimulation and adjusted to 1:10 on the third and fifth days of stimulation. In one aspect, particles are added on a daily or every other day basis to a final ratio of 1:1 on the first day, and 1:10 on the third and fifth days of stimulation. One of skill in the art will appreciate that a variety of other ratios may be suitable for use. In particular, ratios will vary depending on particle size and on cell size and type. In one aspect, the most typical ratios for use are in the neighborhood of 1:1, 2:1 and 3:1 on the first day.

[1129] In further aspects, the cells, such as T cells, are combined with agent-coated beads, the beads and the cells are subsequently separated, and then the cells are cultured. In an alternative aspect, prior to culture, the agent-coated beads and cells are not separated but are cultured together. In a further aspect, the beads and cells are first concentrated by application of a force, such as a magnetic force, resulting in increased ligation of cell surface markers, thereby inducing cell stimulation.

[1130] By way of example, cell surface proteins may be ligated by allowing paramagnetic beads to which anti-CD3 and anti-CD28 are attached (3×28 beads) to contact the T cells. In one aspect the cells (for example, 104 to 109 T cells) and beads (for example, DYNABEADS® M-450 CD3/CD28 T paramagnetic beads at a ratio of 1:1) are combined in a buffer, for example PBS (without divalent cations such as, calcium and magnesium). Again, those of ordinary skill in the art can readily appreciate any cell concentration may be used. For example, the target cell may be very rare in the sample and comprise only 0.01% of the sample or the entire sample (i.e., 100%) may comprise the target cell of interest. Accordingly, any cell number is within the context of the present disclosure. In certain aspects, it may be desirable to significantly decrease the volume in which particles and cells are mixed together (i.e., increase the concentration of cells), to ensure maximum contact of cells and particles. For example, in one aspect, a concentration of about 10 billion cells/ml, 9 billion/ml, 8 billion/ml, 7 billion/ml, 6 billion/ml, 5 billion/ml, or 2 billion cells/ml is used. In one aspect, greater than 100 million cells/ml is used. In a further aspect, a concentration of cells of 10, 15, 20, 25, 30, 35, 40, 45, or 50 million cells/ml is used. In yet one aspect, a concentration of cells from 75, 80, 85, 90, 95, or 100 million cells/ml is used. In further aspects, concentrations of 125 or 150 million cells/ml can be used. Using high concentrations can result in increased cell yield, cell activation, and cell expansion. Further, use of high cell concentrations allows more efficient capture of cells that may weakly express target antigens of interest, such as CD28-negative T cells. Such populations of cells may have therapeutic value and would be desirable to obtain in certain aspects. For example, using high concentration of cells allows more efficient selection of CD8+ T cells that normally have weaker CD28 expression.

[1131] In one embodiment, cells, e.g., cells comprising or which at any time comprised or will comprise a gRNA molecule as described herein, e.g., said cells transduced with a nucleic acid encoding a CAR, e.g., a CAR described herein, are expanded, e.g., by a method described herein. In one embodiment, the cells are expanded in culture for a period of several hours (e.g., about 2, 3, 4, 5, 6, 7, 8, 9, 10, 15, 18, 21 hours) to about 14 days (e.g., 1, 2, 3, 4, 5, 6, 7, 8, 9, 10, 11, 12, 13 or 14 days). In one embodiment, the cells are expanded for a period of 4 to 9 days. In one embodiment, the cells are expanded for a period of 8 days or less, e.g., 7, 6 or 5 days. In one embodiment, the cells are expanded in culture for 5 days, and the resulting cells are more potent than the same cells expanded in culture for 9 days under the same culture conditions. Potency can be defined, e.g., by various T cell functions, e.g. proliferation, target cell killing, cytokine production, activation, migration, or combinations thereof. In one embodiment, the cells are expanded for 5 days show at least a one, two, three or four fold increase in cells doublings upon antigen stimulation as compared to the same cells expanded in culture for 9 days under the same culture conditions. In one embodiment, the cells are expanded in culture for 5 days, and the resulting cells exhibit higher proinflammatory cytokine production, e.g., IFN-γ and/or GM-CSF levels, as compared to the same cells expanded in culture for 9 days under the same culture conditions. In one embodiment, the cells expanded for 5 days show at least a one, two, three, four, five, ten fold or more increase in pg/ml of proinflammatory cytokine production, e.g., IFN-γ and/or GM-CSF levels, as compared to the same cells expanded in culture for 9 days under the same culture conditions.

[1132] Several cycles of stimulation may also be desired such that culture time of T cells can be 60 days or more. Conditions appropriate for T cell culture include an appropriate media (e.g., Minimal Essential Media or RPMI Media 1640 or, X-vivo 15, (Lonza)) that may contain factors necessary for proliferation and viability, including serum (e.g., fetal bovine or human serum), interleukin-2 (IL-2), insulin, IFN-γ, IL-4, IL-7, GM-CSF, IL-10, IL-12, IL-15, TGFβ, and TNF-α or any other additives for the growth of cells known to the skilled artisan. Other additives for the growth of cells include, but are not limited to, surfactant, plasmanate, and reducing agents such as N-acetyl-cysteine and 2-mercaptoethanol. Media can include RPMI 1640, AIM-V, DMEM, MEM, α-MEM, F-12, X-Vivo 15, and X-Vivo 20, Optimizer, with added amino acids, sodium pyruvate, and vitamins, either serum-free or supplemented with an appropriate amount of serum (or plasma) or a defined set of hormones, and/or an amount of cytokine(s) sufficient for the growth and expansion of T cells. Antibiotics, e.g., penicillin and streptomycin, are included only in experimental cultures, not in cultures of cells that are to be infused into a subject. The target cells are maintained under conditions necessary to support growth, for example, an appropriate temperature (e.g., 37° C.) and atmosphere (e.g., air plus 5% CO₂).

[1133] In one embodiment, the cells are expanded in an appropriate media (e.g., media described herein) that includes one or more interleukin that result in at least a 200-fold (e.g., 200-fold, 250-fold, 300-fold, 350-fold) increase in cells over a 14 day expansion period, e.g., as measured by a method described herein such as flow cytometry. In one embodiment, the cells are expanded in the presence of IL-15 and/or IL-7 (e.g., IL-15 and IL-7).

[1134] In embodiments, methods described herein, manufacturing methods for cells, e.g., cells comprising or which at any time comprised or will comprise a gRNA molecule as described herein, e.g., said cells expressing a CAR, comprise removing T regulatory cells, e.g., CD25+ T cells, from a cell population, e.g., using an anti-CD25 antibody, or fragment thereof, or a CD25-binding ligand, IL-2. Methods of removing T regulatory cells, e.g., CD25+ T cells, from a cell population are described herein. In embodiments, the methods, e.g., manufacturing methods, further comprise contacting a cell population (e.g., a cell population in which T regulatory cells, such as CD25+ T cells, have been depleted; or a cell population that has previously contacted an anti-CD25 antibody, fragment thereof, or CD25-binding ligand) with IL-15 and/or IL-7. For example, the cell population (e.g., that has previously contacted an anti-CD25 antibody, fragment thereof, or CD25-binding ligand) is expanded in the presence of IL-15 and/or IL-7.

[1135] In some embodiments the cells, e.g., cells comprising or which at any time comprised or will comprise a gRNA molecule as described herein, e.g., said cells expressing a CAR as described herein, are contacted with a composition comprising a interleukin-15 (IL-15) polypeptide, a interleukin-15 receptor alpha (IL-15Ra) polypeptide, or a combination of both a IL-15 polypeptide and a IL-15Ra polypeptide e.g., hetIL-15, during the manufacturing of the CAR-expressing cell, e.g., ex vivo. In embodiments, a cell described herein is contacted with a composition comprising a IL-15 polypeptide during the manufacturing of the cell, e.g., ex vivo. In embodiments, a cell described herein is contacted with a composition comprising a combination of both a IL-15 polypeptide and a IL-15 Ra polypeptide during the manufacturing of the CAR-expressing cell, e.g., ex vivo. In embodiments, a cell described herein is contacted with a composition comprising hetIL-15 during the manufacturing of the CAR-expressing cell, e.g., ex vivo.

[1136] In one embodiment the cells, e.g., cells comprising or which at any time comprised or will comprise a gRNA molecule as described herein, e.g., said cells expressing a CAR as described herein, is contacted with a composition comprising hetIL-15 during ex vivo expansion. In an embodiment, the cell described herein is contacted with a composition comprising an IL-15 polypeptide during ex vivo expansion. In an embodiment, the CAR-expressing cell described herein is contacted with a composition comprising both an IL-15 polypeptide and an IL-15Ra polypeptide during ex vivo expansion. In one embodiment the contacting results in the survival and proliferation of a lymphocyte subpopulation, e.g., CD8+ T cells.

[1137] T cells that have been exposed to varied stimulation times may exhibit different characteristics. For example, typical blood or apheresed peripheral blood mononuclear cell products have a helper T cell population (TH, CD4+) that is greater than the cytotoxic or suppressor T cell population (TC, CD8+). Ex vivo expansion of T cells by stimulating CD3 and CD28 receptors produces a population of T cells that prior to about days 8-9 consists predominately of TH cells, while after about days 8-9, the population of T cells comprises an increasingly greater population of TC cells. Accordingly, depending on the purpose of treatment, infusing a subject with a T cell population comprising predominately of TH cells may be advantageous. Similarly, if an antigen-specific subset of TC cells has been isolated it may be beneficial to expand this subset to a greater degree.

[1138] Further, in addition to CD4 and CD8 markers, other phenotypic markers vary significantly, but in large part, reproducibly during the course of the cell expansion process. Thus, such reproducibility enables the ability to tailor an activated T cell product for specific purposes.

[1139] Once a cell has been engineered to express a CAR described herein is constructed, various assays can be used to evaluate the activity of the molecule, such as but not limited to, the ability to expand T cells following antigen stimulation, sustain T cell expansion in the absence of re-stimulation, and anti-cancer activities in appropriate in vitro and animal models. Assays to evaluate the effects of a CAR and/or cell expressing CAR are described in further detail below

[1140] Western blot analysis of CAR expression in primary T cells can be used to detect the presence of monomers and dimers. See, e.g., Milone et al., Molecular Therapy 17(8): 1453-1464 (2009). Very briefly, T cells (1:1 mixture of CD4+ and CD8+ T cells) expressing the CARs are expanded in vitro for more than 10 days followed by lysis and SDS-PAGE under reducing conditions. CARs containing the full length TCR-ζ cytoplasmic domain and the endogenous TCR-ζ chain are detected by western blotting using an antibody to the TCR-ζ chain. The same T cell subsets are used for SDS-PAGE analysis under non-reducing conditions to permit evaluation of covalent dimer formation.

[1141] In vitro expansion of CAR+ T cells following antigen stimulation can be measured by flow cytometry. For example, a mixture of CD4+ and CD8+ T cells are stimulated with αCD3/αCD28 aAPCs followed by transduction with lentiviral vectors expressing GFP under the control of the promoters to be analyzed. Exemplary promoters include the CMV IE gene, EF-1α, ubiquitin C, or phosphoglycerokinase (PGK) promoters. GFP fluorescence is evaluated on day 6 of culture in the CD4⁺ and/or CD8⁺ T cell subsets by flow cytometry. See, e.g., Milone et al., Molecular Therapy 17(8): 1453-1464 (2009). Alternatively, a mixture of CD4⁺ and CD8⁺ T cells are stimulated with αCD3/αCD28 coated magnetic beads on day 0, and transduced with CAR on day 1 using a bicistronic lentiviral vector expressing CAR along with eGFP using a 2A ribosomal skipping sequence. Cultures are re-stimulated with either a cancer associated antigen as described herein⁺ K562 cells (K562 expressing a cancer associated antigen as described herein), wild-type K562 cells (K562 wild type) or K562 cells expressing hCD32 and 4-1BBL in the presence of antiCD3 and anti-CD28 antibody (K562-BBL-3/28) following washing. Exogenous IL-2 is added to the cultures every other day at 100 IU/ml. GFP⁺ T cells are enumerated by flow cytometry using bead-based counting. See, e.g., Milone et al., Molecular Therapy 17(8): 1453-1464 (200)).

[1142] Sustained CAR⁺ T cell expansion in the absence of re-stimulation can also be measured. See, e.g., Milone et al., Molecular Therapy 17(8): 1453-1464 (2009). Briefly, mean T cell volume (fl) is measured on day 8 of culture using a Coulter Multisizer III particle counter, a Nexcelom Cellometer Vision or Millipore Scepter, following stimulation with αCD3/αCD28 coated magnetic beads on day 0, and transduction with the indicated CAR on day 1.

[1143] Animal models can also be used to measure a CART activity. For example, xenograft model using human a cancer associated antigen described herein-specific CAR⁺ T cells to treat a primary human pre-B ALL in immunodeficient mice can be used. See, e.g., Milone et al., Molecular Therapy 17(8): 1453-1464 (2009). Very briefly, after establishment of ALL, mice are randomized as to treatment groups. Different numbers of a cancer associated antigen-specific CARengineered T cells are coinjected at a 1:1 ratio into NOD-SCID-γ^{-/-} mice bearing B-ALL. The number of copies of a cancer associated antigen-specific CAR vector in spleen DNA from mice is evaluated at various times following T cell injection. Animals are assessed for leukemia at weekly intervals. Peripheral blood a cancer associate antigen as described herein⁺ B-ALL blast cell counts are measured in mice that are injected with a cancer associated antigen described herein-ζ CAR⁺ T cells or mock-transduced T cells. Survival curves for the groups are compared using the log-rank test. In addition, absolute peripheral blood CD4⁺ and CD8⁺ T cell counts 4 weeks following T cell injection in NOD-SCID-γ^{-/-} mice can also be analyzed. Mice are injected with leukemic cells and 3 weeks later are injected with T cells engineered to express CAR by a bicistronic lentiviral vector that encodes the CAR linked to eGFP. T cells are normalized to 45-50% input GFP⁺ T cells by mixing with mock-transduced cells prior to injection, and confirmed by flow cytometry. Animals are assessed for leukemia at 1-week intervals. Survival curves for the CAR⁺ T cell groups are compared using the log-rank test.

[1144] Dose dependent CAR treatment response can be evaluated. See, e.g., Milone et al., Molecular Therapy 17(8): 1453-1464 (2009). For example, peripheral blood is obtained 35-70 days after establishing leukemia in mice injected on day 21 with CAR T cells, an equivalent number of mock-transduced T cells, or no T cells. Mice from each group are randomly bled for determination of peripheral blood a cancer associate antigen as described herein⁺ ALL blast counts and then killed on days 35 and 49. The remaining animals are evaluated on days 57 and 70.

[1145] Assessment of cell proliferation and cytokine production has been previously described, e.g., at Milone et al., Molecular Therapy 17(8): 1453-1464 (2009). Briefly, assessment of CAR-mediated proliferation is performed in microtiter plates by mixing washed T cells with K562 cells expressing a cancer associated antigen described herein (K 19) or CD32 and CD137 (KT32-BBL) for a final T-cell:K562 ratio of 2:1. K562 cells are irradiated with gamma-radiation prior to use. Anti-CD3 (clone OKT3) and anti-CD28 (clone 9.3) monoclonal antibodies are added to cultures with KT32-BBL cells to serve as a positive control for stimulating T-cell proliferation since these signals support long-term CD8⁺ T cell expansion ex vivo. T cells are enumerated in cultures using CountBright™ fluorescent beads (Invitrogen, Carlsbad, Calif.) and flow cytometry as described by the manufacturer. CAR⁺ T cells are identified by GFP expression using T cells that are engineered with eGFP-2A linked CAR-expressing lentiviral vectors. For CAR+ T cells not expressing GFP, the CAR+ T cells are detected with biotinylated recombinant a cancer associate antigen as described herein protein and a secondary avidin-PE conjugate. CD4+ and CD8⁺ expression on T cells are also simultaneously detected with specific monoclonal antibodies (BD Biosciences). Cytokine measurements are performed on supernatants collected 24 hours following re-stimulation using the human TH1/TH2 cytokine cytometric bead array kit (BD Biosciences, San Diego, Calif.) according the manufacturer's instructions. Fluorescence is assessed using a FACScalibur flow cytometer, and data is analyzed according to the manufacturer's instructions.

[1146] Cytotoxicity can be assessed by a standard 51Cr-release assay. See, e.g., Milone et al., Molecular Therapy 17(8): 1453-1464 (2009). Briefly, target cells (K562 lines and primary pro-B-ALL cells) are loaded with 51Cr (as NaCrO4, New England Nuclear, Boston, Mass.) at 37° C., for 2 hours with frequent agitation, washed twice in complete RPMI and plated into microtiter plates. Effector T cells are mixed with target cells in the wells in complete RPMI at varying ratios of effector cell:target cell (E:T). Additional wells containing media only (spontaneous release, SR) or a 1% solution of triton-X 100 detergent (total release. TR) are also prepared. After 4 hours of incubation at 37° C. supernatant from each well is harvested. Released 51Cr is then measured using a gamma particle counter (Packard Instrument Co., Waltham, Mass.). Each condition is performed in at least triplicate, and the percentage of lysis is calculated using the formula: % Lysis=(ER−SR)/(TR−SR), where ER represents the average 51Cr released for each experimental condition.

[1147] Imaging technologies can be used to evaluate specific trafficking and proliferation of CARs in tumor-bearing animal models. Such assays have been described, for example, in Barrett et al., Human Gene Therapy 22:1575-1586 (2011). Briefly, NOD/SCID/γc^{-/-} (NSG) mice are injected IV with Nalm-6 cells followed 7 days later with T cells 4 hour after electroporation with the CAR constructs. The T cells are stably transfected with a lentiviral construct to express firefly luciferase, and mice are imaged for bioluminescence. Alternatively, therapeutic efficacy and specificity of a single injection of CAR⁺ T cells in Nalm-6 xenograft model can be measured as the following: NSG mice are injected with Nalm-6 transduced to stably express firefly luciferase, followed by a single tail-vein injection of T cells electroporated with CAR 7 days later. Animals are imaged at various time points post injection. For example, photon-density heat maps of firefly luciferasepositive leukemia in representative mice at day 5 (2 days before treatment) and day 8 (24 hr post CAR⁺ PBLs) can be generated.

[1148] Other assays, including those described in the Example section herein as well as those that are known in the art can also be used to evaluate the cells and cells expressing CARs described herein.

### Delivery Timing

[1149] In an embodiment, one or more nucleic acid molecules (e.g., DNA molecules) other than the components of a Cas system, e.g., the Cas9 molecule component and/or the gRNA molecule component described herein, are delivered. In an embodiment, the nucleic acid molecule is delivered at the same time as one or more of the components of the Cas system are delivered. In an embodiment, the nucleic acid molecule is delivered before or after (e.g., less than about 30 minutes, 1 hour, 2 hours, 3 hours, 6 hours, 9 hours, 12 hours, 1 day, 2 days, 3 days, 1 week, 2 weeks, or 4 weeks) one or more of the components of the Cas system are delivered. In an embodiment, the nucleic acid molecule is delivered by a different means than one or more of the components of the Cas system, e.g., the Cas9 molecule component and/or the gRNA molecule component, are delivered. The nucleic acid molecule can be delivered by any of the delivery methods described herein. For example, the nucleic acid molecule can be delivered by a viral vector, e.g., an integration-deficient lentivirus, and the Cas9 molecule component and/or the gRNA molecule component can be delivered by electroporation, e.g., such that the toxicity caused by nucleic acids (e.g., DNAs) can be reduced. In an embodiment, the nucleic acid molecule encodes a therapeutic protein, e.g., a protein described herein. In an embodiment, the nucleic acid molecule encodes an RNA molecule, e.g., an RNA molecule described herein.

### Bi-Modal or Differential Delivery of Components

[1150] Separate delivery of the components of a Cas system, e.g., the Cas9 molecule component and the gRNA molecule component, and more particularly, delivery of the components by differing modes, can enhance performance, e.g., by improving tissue specificity and safety. In an embodiment, the Cas9 molecule and the gRNA molecule are delivered by different modes, or as sometimes referred to herein as differential modes. Different or differential modes, as used herein, refer modes of delivery, that confer different pharmacodynamic or pharmacokinetic properties on the subject component molecule, e.g., a Cas9 molecule, gRNA molecule, template nucleic acid, or payload. E.g., the modes of delivery can result in different tissue distribution, different half-life, or different temporal distribution, e.g., in a selected compartment, tissue, or organ.

Some modes of delivery, e.g., delivery by a nucleic acid vector that persists in a cell, or in progeny of a cell, e.g., by autonomous replication or insertion into cellular nucleic acid, result in more persistent expression of and presence of a component. Examples include viral, e.g., adeno associated virus or lentivirus, delivery.

[1151] By way of example, the components, e.g., a Cas9 molecule and a gRNA molecule, can be delivered by modes that differ in terms of resulting half life or persistent of the delivered component the body, or in a particular compartment, tissue or organ. In an embodiment, a gRNA molecule can be delivered by such modes. The Cas9 molecule component can be delivered by a mode which results in less persistence or less exposure of its to the body or a particular compartment or tissue or organ.

[1152] More generally, in an embodiment, a first mode of delivery is used to deliver a first component and a second mode of delivery is used to deliver a second component. The first mode of delivery confers a first pharmacodynamic or pharmacokinetic property. The first pharmacodynamic property can be, e.g., distribution, persistence, or exposure, of the component, or of a nucleic acid that encodes the component, in the body, a compartment, tissue or organ. The second mode of delivery confers a second pharmacodynamic or pharmacokinetic property. The second pharmacodynamic property can be, e.g., distribution, persistence, or exposure, of the component, or of a nucleic acid that encodes the component, in the body, a compartment, tissue or organ.

[1153] In an embodiment, the first pharmacodynamic or pharmacokinetic property, e.g., distribution, persistence or exposure, is more limited than the second pharmacodynamic or pharmacokinetic property.

[1154] In an embodiment, the first mode of delivery is selected to optimize, e.g., minimize, a pharmacodynamic or pharmacokinetic property, e.g., distribution, persistence or exposure.

[1155] In an embodiment, the second mode of delivery is selected to optimize, e.g., maximize, a pharmacodynamic or pharmcokinetic property, e.g., distribution, persistence or exposure.

[1156] In an embodiment, the first mode of delivery comprises the use of a relatively persistent element, e.g., a nucleic acid, e.g., a plasmid or viral vector, e.g., an AAV or lentivirus. As such vectors are relatively persistent product transcribed from them would be relatively persistent.

[1157] In an embodiment, the second mode of delivery comprises a relatively transient element, e.g., an RNA or protein.

[1158] In an embodiment, the first component comprises gRNA, and the delivery mode is relatively persistent, e.g., the gRNA is transcribed from a plasmid or viral vector, e.g., an AAV or lentivirus. Transcription of these genes would be of little physiological consequence because the genes do not encode for a protein product, and the gR As are incapable of acting in isolation. The second component, a Cas9 molecule, is delivered in a transient manner, for example as mRNA or as protein, ensuring that the full Cas9 molecule/gRNA molecule complex is only present and active for a short period of time.

[1159] Furthermore, the components can be delivered in different molecular form or with different delivery vectors that complement one another to enhance safety and tissue specificity.

[1160] Use of differential delivery modes can enhance performance, safety and efficacy. For example, the likelihood of an eventual off-target modification can be reduced. Delivery of immunogenic components, e.g., Cas9 molecules, by less persistent modes can reduce immunogenicity, as peptides from the bacterially-derived Cas enzyme are displayed on the surface of the cell by MHC molecules. A two-part delivery system can alleviate these drawbacks.

[1161] Differential delivery modes can be used to deliver components to different, but overlapping target regions. The formation active complex is minimized outside the overlap of the target regions. Thus, in an embodiment, a first component, e.g., a gRNA molecule is delivered by a first delivery mode that results in a first spatial, e.g., tissue, distribution. A second component, e.g., a Cas9 molecule is delivered by a second delivery mode that results in a second spatial, e.g., tissue, distribution. In an embodiment, the first mode comprises a first element selected from a liposome, nanoparticle, e.g., polymeric nanoparticle, and a nucleic acid, e.g., viral vector. The second mode comprises a second element selected from the group. In an embodiment, the first mode of delivery comprises a first targeting element, e.g., a cell specific receptor or an antibody, and the second mode of delivery does not include that element. In an embodiment, the second mode of delivery comprises a second targeting element, e.g., a second cell specific receptor or second antibody.

[1162] When the Cas9 molecule is delivered in a virus delivery vector, a liposome, or polymeric nanoparticle, there is the potential for delivery to and therapeutic activity in multiple tissues, when it may be desirable to only target a single tissue. A two-part delivery system can resolve this challenge and enhance tissue specificity. If the gRNA molecule and the Cas9 molecule are packaged in separated delivery vehicles with distinct but overlapping tissue tropism, the fully functional complex is only be formed in the tissue that is targeted by both vectors.

[1163] In one aspect, the delivery is accomplished ex vivo.

### XII. Modified Nucleosides, Nucleotides, and Nucleic Acids

[1164] Modified nucleosides and modified nucleotides can be present in nucleic acids, e.g., particularly gRNA, but also other forms of RNA, e.g., mRNA, RNAi, or siRNA. As described herein “nucleoside” is defined as a compound containing a five-carbon sugar molecule (a pentose or ribose) or derivative thereof, and an organic base, purine or pyrimidine, or a derivative thereof. As described herein, “nucleotide” is defined as a nucleoside further comprising a phosphate group.

[1165] Modified nucleosides and nucleotides can include one or more of:
[1166] (i) alteration, e.g., replacement, of one or both of the non-linking phosphate oxygens and/or of one or more of the linking phosphate oxygens in the phosphodiester backbone linkage;
[1167] (ii) alteration, e.g., replacement, of a constituent of the ribose sugar, e.g., of the 2′ hydroxyl on the ribose sugar;
[1168] (iii) wholesale replacement of the phosphate moiety with “dephospho” linkers;
[1169] (iv) modification or replacement of a naturally occurring nucleobase, including with a non-canonical nucleobase;
[1170] (v) replacement or modification of the ribose-phosphate backbone;
[1171] (vi) modification of the 3′ end or 5′ end of the oligonucleotide, e.g., removal, modification or replacement of a terminal phosphate group or conjugation of a moiety, cap or linker; and
[1172] (vii) modification or replacement of the sugar.

[1173] The modifications listed above can be combined to provide modified nucleosides and nucleotides that can have two, three, four, or more modifications. For example, a modified nucleoside or nucleotide can have a modified sugar and a modified nucleobase. In an embodiment, every base of a gRNA is modified, e.g., all bases have a modified phosphate group, e.g., all are phosphorothioate groups. In an embodiment, all, or substantially all, of the phosphate groups of a unimolecular or modular gRNA molecule are replaced with phosphorothioate groups.

[1174] In an embodiment, modified nucleotides, e.g., nucleotides having modifications as described herein, can be incorporated into a nucleic acid, e.g., a “modified nucleic acid.” In some embodiments, the modified nucleic acids comprise one, two, three or more modified nucleotides. In some embodiments, at least 5% (e.g., at least about 5%, at least about 10%, at least about 15%, at least about 20%, at least about 25%, at least about 30%, at least about 35%, at least about 40%, at least about 45%, at least about 50%, at least about 55%, at least about 60%, at least about 65%, at least about 70%, at least about 75%, at least about 80%, at least about 85%, at least about 90%, at least about 95%, or about 100%) of the positions in a modified nucleic acid are a modified nucleotides.

[1175] Unmodified nucleic acids can be prone to degradation by, e.g., cellular nucleases. For example, nucleases can hydrolyze nucleic acid phosphodiester bonds. Accordingly, in one aspect the modified nucleic acids described herein can contain one or more modified nucleosides or nucleotides, e.g., to introduce stability toward nucleases.

[1176] In some embodiments, the modified nucleosides, modified nucleotides, and modified nucleic acids described herein can exhibit a reduced innate immune response when introduced into a population of cells, both in vivo and ex vivo. The term “innate immune response” includes a cellular response to exogenous nucleic acids, including single stranded nucleic acids, generally of viral or bacterial origin, which involves the induction of cytokine expression and release, particularly the interferons, and cell death. In some embodiments, the modified nucleosides, modified nucleotides, and modified nucleic acids described herein can disrupt binding of a major groove interacting partner with the nucleic acid. In some embodiments, the modified nucleosides, modified nucleotides, and modified nucleic acids described herein can exhibit a reduced innate immune response when introduced into a population of cells, both in vivo and ex vivo, and also disrupt binding of a major groove interacting partner with the nucleic acid.

### Definitions of Chemical Groups

[1177] As used herein, “alkyl” is meant to refer to a saturated hydrocarbon group which is straight-chained or branched. Example alkyl groups include methyl (Me), ethyl (Et), propyl (e.g., n-propyl and isopropyl), butyl (e.g., n-butyl, isobutyl, t-butyl), pentyl (e.g., n-pentyl, isopentyl, neopentyl), and the like. An alkyl group can contain from 1 to about 20, from 2 to about 20, from 1 to about 12, from 1 to about 8, from 1 to about 6, from 1 to about 4, or from 1 to about 3 carbon atoms.

[1178] As used herein, “aryl” refers to monocyclic or polycyclic (e.g., having 2, 3 or 4 fused rings) aromatic hydrocarbons such as, for example, phenyl, naphthyl, anthracenyl,
[1179] phenanthrenyl, indanyl, indenyl, and the like. In some embodiments, aryl groups have from 6 to about 20 carbon atoms.

[1180] As used herein, “alkenyl” refers to an aliphatic group containing at least one double bond. As used herein. “alkynyl” refers to a straight or branched hydrocarbon chain containing 2-12 carbon atoms and characterized in having one or more triple bonds. Examples of alkynyl groups include, but are not limited to, ethynyl, propargyl, and 3-hexynyl.

[1181] As used herein, “arylalkyl” or “aralkyl” refers to an alkyl moiety in which an alkyl hydrogen atom is replaced by an aryl group. Aralkyl includes groups in which more than one hydrogen atom has been replaced by an aryl group. Examples of “arylalkyl” or “aralkyl” include benzyl, 2-phenylethyl, 3-phenylpropyl, 9-fluorenyl, benzhydryl, and trityl groups.

[1182] As used herein, “cycloalkyl” refers to a cyclic, bicyclic, tricyclic, or polycyclic non-aromatic hydrocarbon groups having 3 to 12 carbons. Examples of cycloalkyl moieties include, but are not limited to, cyclopropyl, cyclopentyl, and cyclohexyl.

[1183] As used herein, “heterocyclyl” refers to a monovalent radical of a heterocyclic ring system. Representative heterocyclyls include, without limitation, tetrahydrofuranyl, tetrahydrothienyl, pyrrolidinyl, pyrrolidonyl, piperidinyl, pyrrolinyl, piperazinyl, dioxanyl, dioxolanyl, diazepinyl, oxazepinyl, thiazepinyl, and morpholinyl.

[1184] As used herein, “heteroaryl” refers to a monovalent radical of a heteroaromatic ring system. Examples of heteroaryl moieties include, but are not limited to, imidazolyl, oxazolyl, thiazolyl, triazolyl, pyrrolyl, furanyl, indolyl, thiophenyl pyrazolyl, pyridinyl, pyrazinyl, pyridazinyl, pyrimidinyl, indolizinyl, purinyl, naphthyridinyl, quinolyl, and pteridinyl.

### Phosphate Backbone Modifications

### The Phosphate Group

[1185] In some embodiments, the phosphate group of a modified nucleotide can be modified by replacing one or more of the oxygens with a different substituent. Further, the modified nucleotide, e.g., modified nucleotide present in a modified nucleic acid, can include the wholesale replacement of an unmodified phosphate moiety with a modified phosphate as described herein. In some embodiments, the modification of the phosphate backbone can include alterations that result in either an uncharged linker or a charged linker with unsymmetrical charge distribution.

[1186] Examples of modified phosphate groups include, phosphorothioate phosphoroselenates, borano phosphates, borano phosphate esters, hydrogen phosphonates, phosphoroamidates, alkyl or aryl phosphonates and phosphotriesters. In some embodiments, one of the non-bridging phosphate oxygen atoms in the phosphate backbone moiety can be replaced by any of the following groups: sulfur (S), selenium (Sc), BR3 (wherein R can be, e.g., hydrogen, alkyl, or aryl), C (e.g., an alkyl group, an aryl group, and the like), H, NR2 (wherein R can be, e.g., hydrogen, alkyl, or aryl), or OR (wherein R can be, e.g., alkyl or aryl). The phosphorous atom in an unmodified phosphate group is achiral. However, replacement of one of the non-bridging oxygens with one of the above atoms or groups of atoms can render the phosphorous atom chiral; that is to say that a phosphorous atom in a phosphate group modified in this way is a stereogenic center. The stereogenic phosphorous atom can possess either the “R” configuration (herein Rp) or the “S” configuration (herein Sp).

[1187] Phosphorodithioates have both non-bridging oxygens replaced by sulfur. The phosphorus center in the phosphorodithioates is achiral which precludes the formation of oligoribonucleotide diastereomers. In some embodiments, modifications to one or both non-bridging oxygens can also include the replacement of the non-bridging oxygens with a group independently selected from S, Se, B, C, H, N, and OR (R can be, e.g., alkyl or aryl).

[1188] The phosphate linker can also be modified by replacement of a bridging oxygen, (i.e., the oxygen that links the phosphate to the nucleoside), with nitrogen (bridged phosphoroamidates), sulfur (bridged phosphorothioates) and carbon (bridged methylenephosphonates). The replacement can occur at either linking oxygen or at both of the linking oxygens.

### Replacement of the Phosphate Group

[1189] The phosphate group can be replaced by non-phosphorus containing connectors. In some embodiments, the charge phosphate group can be replaced by a neutral moiety.

Examples of moietics which can replace the phosphate group can include, without limitation, e.g., methyl phosphonate, hydroxylamino, siloxane, carbonate, carboxymethyl, carbamate, amide, thioether, ethylene oxide linker, sulfonate, sulfonamide, thioformacetal, formacetal, oxime, methyleneimino, methylenemethylimino, methylenehydrazo, methylenedimethylhydrazo and methyleneoxymethylimino.

### Replacement of the Ribophosphate Backbone

[1190] Scaffolds that can mimic nucleic acids can also be constructed wherein the phosphate linker and ribose sugar are replaced by nuclease resistant nucleoside or nucleotide surrogates. In some embodiments, the nucleobases can be tethered by a surrogate backbone. Examples can include, without limitation, the morpholino, cyclobutyl, pyrrolidine and peptide nucleic acid (PNA) nucleoside surrogates.

### Sugar Modifications

[1191] The modified nucleosides and modified nucleotides can include one or more modifications to the sugar group. For example, the 2′ hydroxyl group (OH) can be modified or replaced with a number of different “oxy” or “deoxy” substituents. In some embodiments, modifications to the 2′ hydroxyl group can enhance the stability of the nucleic acid since the hydroxyl can no longer be deprotonated to form a 2′-alkoxide ion. The 2′-alkoxide can catalyze degradation by intramolecular nucleophilic attack on the linker phosphorus atom.

[1192] Examples of “oxy”-2′ hydroxyl group modifications can include alkoxy or aryloxy (OR, wherein “R” can be, e.g., alkyl, cycloalkyl, aryl, aralkyl, heteroaryl or a sugar); polyethyleneglycols (PEG), 0(CH2CH20)nCH2CH2OR wherein R can be, e.g., H or optionally substituted alkyl, and n can be an integer from 0 to 20 (e.g., from 0 to 4, from 0 to 8, from 0 to 10, from 0 to 16, from 1 to 4, from 1 to 8, from 1 to 10, from 1 to 16, from 1 to 20, from 2 to 4, from 2 to 8, from 2 to 10, from 2 to 16, from 2 to 20, from 4 to 8, from 4 to 10, from 4 to 16, and from 4 to 20). In some embodiments, the “oxy”-2′ hydroxyl group modification can include “locked” nucleic acids (LNA) in which the 2′ hydroxyl can be connected, e.g., by a Ci-6 alkylene or Cj-6 heteroalkylene bridge, to the 4′ carbon of the same ribose sugar, where exemplary bridges can include methylene, propylene, ether, or amino bridges; O-amino (wherein amino can be, e.g., NH2; alkylamino, dialkylamino, heterocyclyl, arylamino, diarylamino, heteroarylamino, or diheteroaylamino, ethylenediamine, or polyamino) and aminoalkoxy, 0(CH2)n-amino, (wherein amino can be, e.g., NH2; alkylamino, dialkylamino, heterocyclyl, arylamino, diarylamino, heteroarylamino, or diheteroarylamino, ethylenediamine, or polyamino). In some embodiments, the “oxy”-2′ hydroxyl group modification can include the methoxyethyl group (MOE), (OCH2CH2OCH3, e.g., a PEG derivative).

[1193] “Deoxy” modifications can include hydrogen (i.e. deoxyribose sugars, e.g., at the overhang portions of partially ds RNA); halo (e.g., bromo, chloro, fluoro, or iodo); amino (wherein amino can be, e.g., NH₂; alkylamino, dialkylamino, heterocyclyl, arylamino, diarylamino, heteroarylamino, diheteroarylamino, or amino acid); NH(CH₂CH₂NH)ₙCH2CH₂— amino (wherein amino can be, e.g., as described herein), —NHC(O)R (wherein R can be, e.g., alkyl, cycloalkyl, aryl, aralkyl, heteroaryl or sugar), cyano; mercapto; alkyl-thio-alkyl; thioalkoxy; and alkyl, cycloalkyl, aryl, alkenyl and alkynyl, which may be optionally substituted with e.g., an amino as described herein.

[1194] The sugar group can also contain one or more carbons that possess the opposite stereochemical configuration than that of the corresponding carbon in ribose. Thus, a modified nucleic acid can include nucleotides containing e.g., arabinose, as the sugar. The nucleotide “monomer” can have an alpha linkage at the Γ position on the sugar, e.g., alpha-nucleosides. The modified nucleic acids can also include “abasic” sugars, which lack a nucleobase at C—. These abasic sugars can also be further modified at one or more of the constituent sugar atoms. The modified nucleic acids can also include one or more sugars that are in the L form, e.g. L-nucleosides.

[1195] Generally, RNA includes the sugar group ribose, which is a 5-membered ring having an oxygen. Exemplary modified nucleosides and modified nucleotides can include, without limitation, replacement of the oxygen in ribose (e.g., with sulfur (S), selenium (Se), or alkylene, such as, e.g., methylene or ethylene); addition of a double bond (e.g., to replace ribose with cyclopentenyl or cyclohexenyl); ring contraction of ribose (e.g., to form a 4-membered ring of cyclobutane or oxetane); ring expansion of ribose (e.g., to form a 6- or 7-membered ring having an additional carbon or heteroatom, such as for example, anhydrohexitol, altritol, mannitol, cyclohexanyl, cyclohexenyl, and morpholino that also has a phosphoramidate backbone). In some embodiments, the modified nucleotides can include multicyclic forms (e.g., tricyclo; and “unlocked” forms, such as glycol nucleic acid (GNA) (e.g., R-GNA or S-GNA, where ribose is replaced by glycol units attached to phosphodiester bonds), threose nucleic acid (TNA, where ribose is replaced with a-L-threofuranosyl-(3′→2′)).

### Modifications on the Nucleobase

[1196] The modified nucleosides and modified nucleotides described herein, which can be incorporated into a modified nucleic acid, can include a modified nucleobase. Examples of nucleobases include, but are not limited to, adenine (A), guanine (G), cytosine (C), and uracil (U). These nucleobases can be modified or wholly replaced to provide modified nucleosides and modified nucleotides that can be incorporated into modified nucleic acids. The nucleobase of the nucleotide can be independently selected from a purine, a pyrimidine, a purine or pyrimidine analog. In some embodiments, the nucleobase can include, for example, naturally-occurring and synthetic derivatives of a base.

### Uracil

[1197] In some embodiments, the modified nucleobase is a modified uracil. Exemplary nucleobases and nucleosides having a modified uracil include without limitation pseudouridine (ψ), pyridin-4-one ribonucleoside, 5-aza-uridine, 6-aza-uridine, 2-thio-5-aza-uridine, 2-thio-uridine (s2U), 4-thio-uridine (s4U), 4-thio-pseudouridine, 2-thio-pseudouridine, 5-hydroxy-u,ridine (ho⁵U), 5-aminoallyl-uridine, 5-halo-uridine (e.g., 5-iodo-uridine or 5-bromo-uridine), 3-methyl-uridine (m³U), 5-methoxy-uridine (mo⁵U), uridine 5-oxyacetic acid (cmo⁵U), uridine 5-oxyacetic acid methyl ester (mcmo\hat{ }U), 5-carboxymethyl-uridine (cm^{s}U), 1-carboxymethyl-pseudouridine, 5-carboxyhydroxymethyl-uridine (chm⁵U), 5-carboxyhydroxymethyl-uridine methyl ester (mchms⁵U), 5-methoxycarbonylmethyl-uridine (mcm⁵U), 5-methoxycarbonylmethyl-2-thio-uridine (mcm⁵s2U), 5-aminomethyl-2-thio-uridine (nm⁵s2U), 5-methylaminomethyl-uridine (mnm⁵U), 5-methylaminomethyl-2-thio-uridine (mnm⁵s2U), 5-methylaminomethyl-2-seleno-uridine (mnm⁵se²U), 5-carbamoylmethyl-uridine (ncm⁵U), 5-carboxymethylaminomethyl-uridine (cmnm⁵U), 5-carboxymethylaminomethyl-2-thio-uridine (cmnm\s2U), 5-propynyl-uridine, 1-propynyl-pseudouridine, 5-taurinomethyl-uridine (xcm⁵U), 1-taurinomethyl-pseudouridine, 5-taurinomethyl-2-thio-uridine (Trn⁵s2U), 1-taurinomethyl-4-thio-pseudouridine, 5-methyl-uridine (m⁵U, i.e., having the nucleobase deoxythymine), 1-methyl-pseudouridine (ιτι′ψ), 5-methyl-2-thio-uridine (m⁵s2U), 1-methyl-4-thio-pseudouridine (m′s\|/), 4-thio-1-methyl-pseudouridine, 3-methyl-pseudouridine (m′V), 2-thio-1-methyl-pseudouridine, 1-methyl-1-deaza-pseudouridine, 2-thio-1-methyl-1-deaza-pseudouridine, dihydroundine (D), dihydropseudoundine, 5,6-dihydrouridine, 5-methyl-dihydrouridine (m⁵D), 2-thio-dihydrouridine, 2-thio-dihydropseudouridine, 2-methoxy-uridine, 2-methoxy-4-thio-uridine, 4-methoxy-pseudouridine, 4-methoxy-2-thio-pseudouridine, N 1-methyl-pseudouridine, 3-(3-amino-3-carboxypropyl)uridine (acp³U), 1-methyl-3-(3-amino-3-carboxypropyl pseudouridine 5-(isopentenylaminomethyl)uridine (inm⁵U), 5-(isopentenylaminomethyl])-2-thio-uridine (inm⁵s2U), a-thio-uridine, 2′-0-methyl-uridine (Urn), 5,2′-0-dimethyl-uridine (m⁵Um), 2′-0-methyl-pseudouridine (ψπt), 2-thio-2′-0-methyl-uridine (s2Um), 5-methoxycarbonylmethyl-2-0-methyl-uridine (mcm ⁵Um), 5-carbamoylmethyl-2′-0-methyl-uridine (ncm ⁵Um), 5-carboxymethylaminomethyl-2′-0-methyl-uridine (cmnm⁵Um), 3,2′-0-dimethyl-uridine (m³Um), 5-(isopentenylaminomethyl)-2′-0-methyl-uridine (inm ⁵Um), 1-thio-uridine, deoxythymidine, 2′-F-ara-uridine, 2′-F-uridine, 2′-OH-ara-uridine, 5-(2-carbomethoxyvinyl) uridine, 5-[3-(1-E-propenylamino)uridine, pyrazolo[3,4-d]pyrimidines, xanthine, and hypoxanthine.

### Cytosine

[1198] In some embodiments, the modified nucleobase is a modified cytosine. Exemplary nucleobases and nucleosides having a modified cytosine include without limitation 5-aza-cytidine, 6-aza-cytidine, pseudoisocytidine, 3-methyl-cytidine (m³C), N4-acetyl-cytidine (act), 5-formyl-cytidine (f⁵C), N4-methyl-cytidine (m⁴C), 5-methyl-cytidine (m⁵C), 5-halo-cytidine (e.g., 5-iodo-cytidine), 5-hydroxymethyl-cytidine (hm⁵C), 1-methyl-pseudoisocytidine, pyrrolo-cytidine, pyrrolo-pseudoisocytidine, 2-thio-cytidine (s2C), 2-thio-5-methyl-cytidine, 4-thio-pseudoisocytidine, 4-thio-1-methyl-pseudoisocytidine, 4-thio-1-methyl-1-deaza-pseudoisocytidine, 1-methyl-1-deaza-pseudoisocytidine, zebularine, 5-aza-zebularine, 5-methyl-zebularine, 5-aza-2-thio-zebularine, 2-thio-zebularine, 2-methoxy-cytidine, 2-methoxy-5-methyl-cytidine, 4-methoxy-pseudoisocytidine, 4-methoxy-1-methyl-pseudoisocytidine, lysidine (k²C), a-thio-cytidine, 2′-0-methyl-cytidine (Cm), 5,2′-0-dimethyl-cytidine (m⁵Cm), N4-acetyl-2′-0-methyl-cytidine (ac⁴Cm), N4,2′-0-dimethyl-cytidine (m⁴Cm), 5-formyl-2′-0-methyl-cytidine (f⁵Cm), N4,N4,2′-0-trimethyl-cytidine (m⁴₂Cm), 1-thio-cytidine, 2′-F-ara-cytidine, 2′-F-cytidine, and 2′-OH-ara-cytidine.

### Adenine

[1199] In some embodiments, the modified nucleobase is a modified adenine. Exemplary nucleobases and nucleosides having a modified adenine include without limitation 2-amino-purine, 2,6-diaminopurine, 2-amino-6-halo-purine (e.g., 2-amino-6-chloro-purine), 6-halo-purine (e.g., 6-chloi-purine), 2-amino-6-methyl-purine, 8-azido-adenosine, 7-deaza-adenine, 7-deaza-8-aza-adenine, 7-deaza-2-amino-purine, 7-deaza-8-aza-2-amino-purine, 7-deaza-2,6-diaminopurine, 7-deaza-8-aza-2,6-diaminopurine, 1-methyl-adenosine (m′A), 2-methyl-adenine (m A), N6-methyl-adenosine (m⁶A), 2-methylthio-N6-methyl-adenosine (ms2 m⁶A), N6-isopentenyl-adenosine (i⁶A), 2-methylthio-N6-isopentenyl-adenosine (ms²i⁶A), N6-(cis-hydroxyisopentenyl)adenosine (io⁶A), 2-methylthio-N6-(cis-hydroxyisopentenyl)adenosine (ms2io⁶A), N6-glycinylcarbamoyl-adenosine (g⁶A), N6-threonylcarbamoyl-adenosine (t⁶A), N6-methyl-N6-threonylcarbamoyl-adenosine (m⁶t⁶A), 2-methylthio-N6-threonylcarbamoyl-adenosine (ms²g⁶A), N6,N6-dimethyl-adenosine (m⁶₂A), N6-hydroxynorvalylcarbamoyl-adenosine (hn⁶A), 2-methylthio-N6-hydroxynorvalylcarbamoyl-adenosine (ms2hn⁶A), N6-acetyl-adenosine (ac⁶A) 7-methyl-adenine, 2-methylthio-adenine, 2-methoxy-adenine, a-thio-adenosine, 2′-0-methyl-adenosine (Am), N⁶,2′-0-dimethyl-adenosine (m⁵Am), N⁶-Methyl-2′-deoxyadenosine, N6,N6,2′-0-trimethyl-adenosine (m⁶₂Am), 1,2′-0-dimethyl-adenosine (m′Am), 2′-0-ribosyladenosine (phosphate) (Ar(p)), 2-amino-N6-methyl-purine, 1-thio-adenosine, 8-azido-adenosine, 2′-F-ara-adenosine, 2′-F-adenosine, 2′-OH-ara-adenosine, and N6-(19-amino-pentaoxanonadecyl)-adenosine.

### Guanine

[1200] In some embodiments, the modified nucleobase is a modified guanine. Exemplary nucleobases and nucleosides having a modified guanine include without limitation inosine (I), 1-methyl-inosine (m′l), wyosine (imG), methylwyosine (mimG), 4-demethyl-wyosine (imG-14), isowyosine (imG2), wybutosine (yW), peroxywybutosine (o₂yW), hydroxywybutosine (OHyW), undemriodified hydroxywybutosine (OHyW*), 7-deaza-guanosine, queuosine (Q), epoxyqueuosine (oQ), galactosyl-queuosine (galQ), mannosyl-queuosine (manQ), 7-cyano-7-deaza-guanosine (preQo), 7-aminomethyl-7-deaza-guanosine (preQi), archaeosine (G⁺), 7-deaza-8-aza-guanosine, 6-thio-guanosine, 6-thio-7-deaza-guanosine, 6-thio-7-deaza-8-aza-guanosine, 7-methyl-guanosine (m⁷G), 6-thio-7-methyl-guanosine, 7-methyl-inosine, 6-methoxy-guanosine, 1-methyl-guanosine (m′G), N2-methyl-guanosine (m²G), N2,N2-dimethyl-guanosine (m²₂G), N2,7-dimethyl-guanosine (m²,7G), N2, N2,7-dimethyl-guanosine (m²,2,7G), 8-oxo-guanosine, 7-methyl-8-oxo-guanosine, 1-meth thio-guanosine, N2-methyl-6-thio-guanosine, N2,N2-dimethyl-6-thio-guanosine, a-thio-guanosine, 2′-0-methyl-guanosine (Gm), N2-methyl-2′-0-methyl-guanosine (m¾m), N2,N2-dimethyl-2′-0-methyl-guanosine (m²₂Gm), 1-methyl-2′-0-methyl-guanosine (m′Gm), N2,7-dimethyl-2′-0-methyl-guanosine (m²,7Gm), 2′-0-methyl-inosine (Im), 1, 2′-0-dimethyl-inosine (m′lm), 0⁶-phenyl-2-deoxyinosine, 2′-0-ribosylguanosine (phosphate) (Gr(p)), 1-thio-guanosine, 0⁶-methyl]-guanosine, 0⁶-Methyl-2′-deoxyguanosine, 2′-F-ara-guanosine, and 2′-F-guanosine.

Modified gRNAs

[1201] In some embodiments, the modified nucleic acids can be modified gRNAs. In some embodiments, gRNAs can be modified at the 3′ end. In this embodiment, the gRNAs can be modified at the 3′ terminal U ribose. For example, the two terminal hydroxyl groups of the U ribose can be oxidized to aldehyde groups and a concomitant opening of the ribose ring to afford a modified nucleoside, wherein U can be an unmodified or modified uridine.

[1202] In another embodiment, the 3′ terminal U can be modified with a 2′ 3′ cyclic phosphate, wherein U can be an unmodified or modified uridine. In some embodiments, the gRNA molecules may contain 3′ nucleotides which can be stabilized against degradation, e.g., by incorporating one or more of the modified nucleotides described herein. In this embodiment, e.g., uridines can be replaced with modified uridines, e.g., 5-(2-amino)propyl uridine, and 5-bromo uridine, or with any of the modified uridines described herein; adenosines and guanosines can be replaced with modified adenosines and guanosines, e.g., with modifications at the 8-position, e.g., 8-bromo guanosine, or with any of the modified adenosines or guanosines described herein. In some embodiments, deaza nucleotides, e.g., 7-deaza-adenosine, can be incorporated into the gRNA. In some embodiments, O- and N-alkylated nucleotides, e.g., N6-methyl adenosine, can be incorporated into the gRNA. In some embodiments, sugar-modified ribonucleotides can be incorporated, e.g., wherein the 2′ OH— group is replaced by a group selected from H, —OR, —R (wherein R can be, e.g., methyl, alkyl, cycloalkyl, aryl, aralkyl, heteroaryl or sugar), halo, —SH, —SR (wherein R can be, e.g., alkyl, cycloalkyl, aryl, aralkyl, heteroaryl or sugar), amino (wherein amino can be, e.g., NH₂; alkylamino, dialkylamino, heterocyclyl, arylamino, diarylamino, heteroarylamino, diheteroarylamino, or amino acid); or cyano (—CN). In some embodiments, the phosphate backbone can be modified as described herein, e.g., with a phosphothioate group. In some embodiments, the nucleotides in the overhang region of the gRNA can each independently be a modified or unmodified nucleotide including, but not limited to 2′-sugar modified, such as, 2-F 2′-0-methyl, thymidine (T), 2′-O-methoxyethyl-5-methyluridine (Teo), 2′-O-methoxyethyladenosine (Aeo), 2′-O-methoxyethyl-5-methylcytidine (m5Ceo), and any combinations thereof.

[1203] In an embodiment, a one or more or all of the nucleotides in single stranded overhang of an RNA molecule, e.g., a gRNA molecule, are deoxynucleotides.

[1204] Candidate Cas molecules, e.g., Cas9 molecules, candidate gRNA molecules, candidate Cas9 molecule/gRNA molecule complexes, and candidate CRISPR systems, can be evaluated by art-known methods or as described herein. For example, exemplary methods for evaluating the endonuclease activity of Cas9 molecule are described, e.g., in Jinek el al., SCIENCE 2012; 337(6096):8 16-821.

### EXAMPLES

### Example 1: Assays

### Guide Selection

[1205] Initial guide selection was performed in silico using a human reference genome and user defined genomic regions of interest (e.g., a gene, an exon of a gene, an intron of a gene, a non-coding regulatory region, etc), for identifying PAMs in the regions of interest. For each identified PAM, analyses were performed and statistics reported. gRNA molecules were further selected and rank-ordered based on a number of criteria known in the art. gRNA molecules were then tested as described herein for cutting efficiency and indel formation as described herein.

### Transfection of HEK-293_Cas9GFP Cells for Primary Guide Screening

[1206] Transfection of Cas9GFP-expressing HEK293 cells (HEK-293_Cas9GFP) can be used for primary screening of target specific crRNAs. In this example, target specific crRNAs are designed and selected for primary screening using defined criteria including in silico off-target detection, e.g., as described herein. Selected crRNAs are chemically synthesized and delivered in a % well format. HEK-293-Cas9GFP cells are transfected with target crRNAs comprising a flagpole region of SEQ ID NO: 79 in a 1:1 ratio with stock trRNA of SEQ ID NO: 65. The transfection is mediated using lipofection technology according to manufacturer's protocol (DharmaFECT Duo, GE LifeSciences; or RNAiMax, LifeTechnologies). Transfected cells are lysed 24 h following lipofection and editing (e.g., cleavage) is detected within lysates with the T7E1 assay and/or next generation sequencing (NGS; below).

### T7E1 Assay

[1207] The T7E1 assay is used to detect mutation events in genomic DNA such as insertions, deletions and substitutions created through non-homologous end joining (NHEJ) following DNA cleavage by Cas9 (See Cho et al., Targeted genome engineering in human cells with the Cas9 RNA-guided endonuclease. Nature Biotechnology. 2013; 31, 230-232).

[1208] Genomic DNA regions that have been targeted for cutting by CRISPR/Cas9 are amplified by PCR, denatured at 95° C., for 10 minutes, and then re-annealed by ramping down from 95° C., to 25° C. at 0.5° C. per second. If mutations are present within the amplified region, the DNA is combined to form heteroduplexes. The re-annealed heteroduplexes are then digested with T7E1 (New England Biolabs) at 37° C., for 1 hour. T7E1 endonuclease recognizes DNA mismatches, heteroduplexes and nicked double stranded DNA and generates a double stranded break at these sites. The resulting DNA fragments are analyzed using a Fragment Analyzer and quantified to determine cleavage efficiency.

### RNP Generation

[1209] Unless otherwise noted, all gRNAs were tested in dual gRNA format (in each case, each crRNA comprised the sequence nnnnnnnnnnnnnnnnnnnn GUUUUAGAGCUAUGCU (SEQ ID NO: 1866), where the n residues represent the 20 ribonucleic acid residues of the indicated targeting domain sequence, IDT. 20 nmol tracrRNA catalog #1072533, IDT). The addition of crRNA and trRNA (for a dgRNA) to Cas9 protein results in the formation of the active Cas9 ribonucleoprotein complex (RNP), which mediates binding to and specific cleavage of the target sequence specified by the targeting domain of the gRNA molecule. RNP were generated as described here. Briefly, the crRNA and trRNA were separately denatured at 95° C., for 2 minutes, and allowed to come to room temperature. S. pyogenes CAS9 Protein (NLS CAS9 iPROT106154, 37 μM) was added to 5×CCE buffer (20 mM HEPES, 100 mM KCl, 5 mM MgCl2, 1 mM DTT, 5% glycerol), to which trRNA and crRNAs were added (in separate reactions) and incubated at 37° C., for 10 minutes, thereby forming the active RNP complex. RNP complex formed by protein to RNA ratio at 1:2:2 as 50 uM Cas9:100 uM crRNA:100 uM tracrRNA. The RNP was added to a total of 0.2 million cells first than delivered by Neon electroporation cells as described below.

### Delivery of RNPs to T Cells

[1210] CD3+ T cells are comprised of multiple T cell populations including CD4+ T helper cells and CD8+ cytotoxic T cells. These cells can be isolated from whole blood or from a leukophoresis samples. T cells from human donors were first enriched from a leukopak using a commercially available kit (e.g., EasySep™ Human T Cell Isolation Kit, Stem Cell Technology). Enriched T cells were aliquoted and froen down (at 10×106/vial) for future use. Vials were subsequently thawed as needed. T cells were activated by addition of 3:1 ratio (beads to cells) of CD3/CD28 beads (Dynabeads, Life Technologies) or using ImmunoCult Human CD3/CD28 T cell Activator (Stem Cell Technologies) in T cell media (RPMI 1640, FBS, L-glutamine, non-essential amino acids, sodium pyruvate, HEPES buffer, 2-mercaptoethanol and optionally IL2). RNPs generated as described above were added to ˜50,000-100,000 CD3+ T cells resuspended in T buffer for electroporation. The electroporation was performed with a Neon transfection system (Invitrogen: MPK5000S) using 1600 volts/10 milliseconds and 3 pulses. Duplicate 10 μL electroporations were performed. T cell media was added to cells immediately post-nucleofection and cells were cultured as described in the Examples below. Reagents used in the Examples for flow cytometry are shown below:

| | | | | Amount/ |
|---|---|---|---|---|
| | | | | sample O |
| | | | | R dilution |
| Antibody | Clone | Fluorophore | Vendor/Cat no | factor |
| Anti human | OKT3 | BV786 | Biolegend/317330 | 1:150 |
| CD3 | | | | |
| HLA-DR/P/Q | Tu39 | A488 | Biolegend/361706 | 1:100 |
| HLA-ABC | W6/32 | APC | Ebioscience/17- | 1.100 |
| | | | 9983-42 | |
| Live/Dead | | APC-Cy7 | Invitrogen/L34976 | 1:500 |
| B2M | 2M2 | PE | Biolegend/316306 | 1:250 |
| HLA-DR | LN3 | PerCPCy5.5 | Ebioscience/45- | 1:100 |
| | | | 9956-42 | |

[1211] Next-Generation Sequencing (NGS) and Analysis for On-Target Cleavage Efficiency and Indel Formation

[1212] To determine the efficiency of editing (e.g., cleaving) the target sequence in the genome, deep sequencing was utilized to identify the presence of indels at or near the target sequence complimentary to the targeting domain of the gRNA introduced into the cells.

[1213] PCR primers were designed to flank the target sequence, and the genomic area of interest PCR amplified. Additional PCR was performed according to manufacturers protocols (Illumina) to add the necessary chemistry for sequencing. The amplicons were then sequenced on an Illumina MiSeq instrument. The reads were then aligned to the human reference genome (all genomic coordinates are according to hg38 unless otherwise noted) after eliminating those having low quality scores. From the resulting files containing the reads mapped to the reference genome (BAM files), reads which overlap the target region of interest were selected and the number of wild type reads versus the number of reads which contain an insertion or deletion was calculated. The editing percentage was then defined as the total number of reads with insertions or deletions over the total number of reads, including wild type. To determine the pattern of insertions and/or deletions that resulted from the edit, the aligned reads with indels were selected and the number of a reads with a given indel were summed. This information was then displayed as a list as well as visualized in the form on histograms which represent the frequency of each indel.

[1214] RNPs were generated and delivered to T cells as described above. The gRNA on-target NGS results are shown below. NGS results showed RFXAP gRNA (shown as P3 here) can give ˜88% indel and 76% frame shift. The frame shift may cause premature protein expression, which is higher in P3 compared to gRNA targeting CIITA.

CIITA

| | | | % frameshift |
|---|---|---|---|
| Amplicon-PAM | Guide-Treatment | Avg(% indels) | Editing (avg) |
| PP002961_1F_94 | CR002961 | 1.51% | |
| | CR002961_Control | 0.80% | |
| PP002967_1F_113 | CR002967 | 89.74% | 74.04 |
| | CR002967_Control | 0.97% | |
| PP002991_1F_109 | CR002991 | 93.51% | 64.76 |
| | CR002991_Control | 0.30% | |
| PP002993_2F_106 | CR002993 | 90.08% | 56.92 |
| | CR002993_Control | 0.64% | |
| PP003007_1F_91 | CR003007 | 93.09% | 58.37 |
| | CR003007_Control | 2.11% | |

RFX-AP

| Chromo- | Cas9 | internal_ | repli- | | % | % | % |
|---|---|---|---|---|---|---|---|
| some | Cu [symbol] Site | sample_id | cate | [symbol] | Var | Indel | FS |
| chr13 | 36819831 | P3_ | 1 | [symbol] | [symbol] | [symbol] | [symbol] |
| | | | 2 | [symbol] | [symbol] | [symbol] | [symbol] |
| | | | Sub- | | 58.6% | 58.11% | 76.03% |
| | | | total | | | | |

[symbol]

indicates data missing or illegible when filed

### Example 2: Evaluation of Cas9 Variants

### Evaluation in CD34+ Hematopoietic Stem Cells

[1215] We evaluated 14 purified Streptococcus pyogenes Cas9 (SPyCas9) proteins by measuring their efficiency of knocking out the beta-2-microglobulin (B2M) gene in primary human hematopoietic stem cells (HSCs). These proteins were divided into 3 groups: the first group consisted of SPyCas9 variants with improved selectivity (Slaymaker et al. 2015, Science 351: 84 (e1.0, e1.1 and K855A); Kleinstiver et al. 2016, Nature 529: 490 (HF)). The second group consisted of wild type SPyCas9 with different numbers and/or positions of the SV40 nuclear localization signal (NLS) and the 6×Histidine (His6) (SEQ ID NO: 108) or 8×Histidine (His8) (SEQ ID NO: 109) tag with or without a cleavable TEV site, and a SPyCas9 protein with two cysteine substitutions (C80L, C574E), which have been reported to stabilize Cas9 for structural studies (Nishimasu et al. 2014, Cell 156:935). The third group consisted of the same recombinant SPyCas9 produced by different processes (FIG. 1). B2M knockout was determined by FACS and next generation sequencing (NGS).

### Methods

### Materials

[1216] 1. Neon electroporation instrument (Invitrogen, MPK5000)
2. Neon electroporation kit (Invitrogen, MPK1025)
3. crRNA (comprising a targeting domain to B2M fused to SEQ ID NO: 79)
4. tracrRNA (SEQ ID NO: 65)
5. Cas9 storage buffer: 20 mM Tris-C1, pH 8.0, 200 mM KCl, 10 mM MgCl₂
6. Bone marrow derived CD34+ HSCs (Lonza, 2M-101C)
7. Cell culture media (Stemcell Technologies, StemSpam SFEM II with StemSpam CC-100)
8. FACS wash buffer: 2% FCS in PBS
9. FACS block buffer: per mL PBS, add 0.5 ug mouse IgG, 150 ug Fc block, 20 uL FCS
10. Chelex suspension: 10% Chelex 100 (bioRad, Cat #142-1253) in H²O
11. Anti-B2M antibody: Biolegend, cat #316304

### Process

[1217] Thaw and grow the cells following Lonza's recommendations, add media every 2-3 days. On day 5, pellet the cells at 200×g for 15 min. wash once with PBS, resuspend the cells with T-buffer from NEON kit at 2×10⁴/uL, put on ice. Dilute Cas9 protein with Cas9 storage buffer to 5 mg/ml. Reconstitute crRNA and tracrRNA to 100 uM with H₂O. The ribonucleoprotein (RNP) complex is made by mixing 0.8 uL each of CAS9 protein, crRNA and tracrRNA with 0.6 uL of Cas9 storage buffer, incubate at room temperature for 10 min. Mix 7 uL of HSCs with RNP complex for two minutes and transfer the entire 10 uL into a Neon pipette tip, electroporate at 1700 v, 20 ms and 1 pulse. After electroporation, immediately transfer cells into a well of 24-well plate containing 1 ml media pre-calibrated at 37° C., 5% CO₂. Harvest cells 72 hrs post-electroporation for FACS and NGS analysis.

[1218] FACS: take 250 uL of the cells from each well of 24-well plate, to wells of 96-well U-bottom plate and pellet the cells. Wash once with 2% FCS (fetal calf serum)-PBS. Add 50 uL FACS block buffer to the cells and incubate on ice for 10 minutes, add 1 uL FITC labeled B2M antibody and incubate for 30 minutes. Wash with 150 uL FACS wash buffer once followed by once more with 200 uL FACS wash buffer once. Cells were resuspended in 200 uL FACS buffer FACS analysis.

[1219] NGS sample prep: transfer 250 uL of cell suspension from each well of the 24-well plate to a 1.5 ml Eppendorf tube, add 1 mL PBS and pellet the cells. Add 100 uL of Chelex suspension, incubate at 99° C., for 8 minutes and vortex 10 seconds followed by incubating at 99° C., for 8 minutes, vortex 10 seconds. Pellet down the resin by centrifuging at 10,000×g for 3 minutes and the supernatant lysate is used for PCR. Take 4 uL lysate and do PCR reaction with primers flanking the B2M gRNA target sequence using Titanium kit (Clonetech, cat #639208) and follow the manufacturer's instruction. The following PCR conditions are used: 5 minutes at 98° C., for 1 cycle; 15 seconds at 95° C., 15 seconds at 62° C., and 1 minute at 72° C., for 30 cycles; and finally 3 minutes at 72° C., for 1 cycle. The PCR product was used for NGS.

[1220] Statistics: The percentage of B2M KO cells by FACS and the percentage of indels by NGS are used to evaluate the CAS9 cleavage efficiency. The experiment was designed with Cas9 as fixed effect. Each experiment is nested within donors, as nested random effects. Therefore, the mixed linear model was applied for the analysis of FACS and NGS data.

### Results

[1221] In order to normalize the experimental and donor variations, we graphed the relative activity of each protein to iProt105026, the original design with two SV40 NLS flanking the wild type SPyCas9 and the His6 tag (SEQ ID NO: 108) at the C-terminal of the protein (FIG. 1). The statistical analysis shows that compared with the reference Cas9 protein iProt105026, iProt106331, iProt106518, iProt106520 and iProt16521 are not significantly different in knocking out B2M in HSCs, while the other variants tested (PID426303, iProt106519, iProt106522, iProt106545, iProt106658, iProt106745, iProt106746, iProt106747, iProt106884) are highly significantly different from the reference iProt105026 in knocking out B2M in HSCs. We found that moving the His6 tag (SEQ ID NO: 108) from the C-terminal to N-terminal (iProt106520) did not affect the activity of the protein (FIG. 1). One NLS was sufficient to maintain activity only when it was placed at the C-terminal of the protein (iProt106521 vs. iProt106522, FIG. 1). Proteins purified from process 1 had consistent higher knockout efficiency than those from processes 2 and 3 (iProt106331 vs. iProt106545 & PID426303, FIG. 1). In general, the SPyCas9 variants with a reported improved selectivity were not as active as the wild type SPyCas9 (iProt106745, iProt106746 and iProt106747, FIG. 1). Interestingly iProt106884 did not cut the targeting site. This is consistent with the report by Kleinstiver et al that this variant failed to cut up to 20% of the legitimate targeting sites in mammalian cells (Kleinstiver et al. 2016, Nature 529: 490). Finally, the Cas9 variant with two cysteine substitutions (iProt106518) maintained high levels of enzymatic activity (FIG. 1).

### Evaluation in T Cells

### Methods

[1222] The different S. pyogenes Cas9 variants shown in Table 14 were used in these experiments. The structures are also shown in FIG. 1.

TABLE 14
Cas9 variants (NLS = SV40 NLS; Cas9 = S. Pyogenes Cas9 wild type,
with any mutations indicated in parenthesis; Cas9e1.1 (as described in
Slaymaker et al. 2015, Science 351: 84); GGS = glycine-glycine-serine).

| | CAS9 | | | Molar |
|---|---|---|---|---|
| | (His6 disclosed as | Size | Conc | conc. |
| iprot | SEQ ID NO: 108) | (Daltons) | (ug/ml) | [uM] |
| 106520 | His6-GGS-NLS- | 161696.22 | 6.2 | 38.34 |
| | CAS9-NLS | | | |
| 106518 | NLS-CAS9(C80L, | 161531.04 | 6.5 | 40.24 |
| | C574E)-NLS-His6 | | | |
| 106521 | NLS-CAS9-His6 | 160629.9 | 6 | 37.12 |
| 106745 | NLS-CAS9(K855A)- | 161437.94 | 5.9 | 36.55 |
| | NLS-His6 | | | |
| 106747 | NLS-CAS9e1.1- | 161295.74 | 6.5 | 40.3 |
| | NLS-His6 | | | |
| 106154 | NLS-CAS9-NLS-His6 | 161495.04 | 5.9 | 36.54 |
| (also referred | | | | |
| to as 105026) | | | | |

[1223] PBMC were isolated from human blood (obtained from Hemacare/ALL Cells) by using centrifugation method using Ficoll (GE Healthcare catalog #17-1440-03). Total T cells were isolated from these PBMC's using human Pan T Cell Isolation Kit (Miltenyi Biotec #130-096-535). These cells were aliquoted, frozen using CRYOSTOR CS10 media (Biolife Solution-210102), and stored in liquid nitrogen. These frozen cell aliquots were then thawed in a 37 degree C. water bath for 20 secs and then transferred to a 50 ml conical tube in 10 ml of pre-warmed T cell media and centrifuged at 300 rpm for 5-10 mins at 24 degrees C. to remove the freezing media and resuspended with prewarmed T cell media. These are then activated by using CD3/CD28 beads (DynaBeads Invitrogen Cat #111.41D) at a bead to cell ratio of 3:1 at keeping the cell concentration at 0.5 million/ml and activated using CD3/CD28 beads (DynaBeads Invitrogen Cat #111.41D) at bead to cell ratio of 3:1 at 0.5 million/ml concentration of cells.

[1224] On Day 3 post bead activation, the 200,000 cells are used per electroporation. RNP complex used for T cell genome editing was formed using a 1:2 molar ratio of Cas9 protein to RNA (crRNA and tracRNA). 100 μM crRNA ([targeting domain]-[SEQ ID NO: 79]) and 100 μM tracrRNA (SEQ ID NO: 65) were denatured separately at 95° C., for 2 min and cooled to room temperature. In a final volume of 5 μL, 1.4 μL of Cas9 proteins at a concentration of 5.9 μg/μL was mixed with 1.6 μL of reaction buffer (20 mM Tris. pH8.0; 200 mM KCL, 10 mM MgCl2) and mixed with 1 μL of 100 μM tracrRNA at room temperature. Next 1 μL of 100 μM crRNA was added, mixed and incubated for 10 min at 37° C. High efficiency gRNAs targeting TRAC and B2M were used. These RNP's at higher concentrations were used to generate samples of RNP serial dilutions. These RNP dilutions were then used to mix with 200,000 cells in 10 ul of T Buffer (neon transfection system 10 ul Kit). Electroporation was performed by Neon electroporator using Neon® Transfection System 10 μL Kit (MPK1096) at 1600V, 10 ns, 3 pulses. Cells were cultured in T cell media without antibiotics. Cells were taken from each sample pipetted to dissociate them from beads and beads were removed by using 96 welled plate magnet and centrifuged with 100 ul of FACS buffer (Miltenyi MACS buffer catalog #130-092-987 with 0.5% BSA (Miltenyi—catalog #130-091-376) to wash the cells. Cells were then incubated with different antibodies diluted in 100 ul FACS buffer for 30 mins on ice. Cells were then washed two times with 200 ul of FACS buffer. Cells are then resuspended in 150 ul of FACS buffer and run on BD 5 laser Fortessa. Expression of TCR was detected by using anti-CD3-PercpCy5.5 (Ebiosciencs 45-0037-42) and expression of B2M was detected by using anti-B2M-APC (316312 Biolegend). Flow cytometry data was analyzed using FlowJo Software.

### Results

[1225] Generation of low concentrations of RNP, and highest editing efficiency, proceeded well when RNP was generated at high concentration, and then diluted to the desired concentrations. 6 different Cas9 proteins were tested for efficiency of editing using the B2M guide in primary T cells. Editing efficiency was measured using cell surface detection by flow cytometry of the B2M protein and the results are shown in FIG. 2 (Y-axis; % Editing of B2M) 3 days after RNP electroporation at the indicated concentrations of RNP (X-axis). The different Cas9 proteins tested are indicated by their “iprot” ID numbers (see FIG. 1 and Table 14). The results are shown in FIG. 2. These data indicate that all of these variants of Cas9 are active, but Cas9 proteins 106521, 106518, and 106154 (also referred to as 105026) show higher activity in T cells, as evidenced by their greater activity at lower concentrations of RNP. Next, two different Cas9 proteins, 106884 or 106154 (also referred to as 105026), as indicated, were tested for editing efficiency using the B2M targeting guide RNA (FIG. 3, left panel) or the TRAC targeting guide (FIG. 3, right panel) by using different concentrations of RNP as indicated on the X-axis. Editing efficiency (% editing) was measured by flow cytometry by measuring the loss of cell surface expression of B2M (FIG. 3, left panel) or TCR using CD3 epsilon antibody (FIG. 3B).

### Example 3. Knock-Out of MHC-II Expression with CRISPR Systems Targeting RFXAP in Human Primary T Cells

[1226] Based on the human h38 genome sequence, potential PAM sequences were determined, and 20 nt crRNA were synthesized by IDT. Human CD3+ T cells were activated and electroporated with RNP containing gRNA comprising a targeting domain complementary to target sequences within the RFXAP gene: RFXAP P1 (5994_1::chr13:36819181-36819977_295), P2 (5994_1::chr13:36819181-36819977_163), P3 (5994_1::chr13:36819181-36819977_202), and P4 (5994_1::chr13:36819181-36819977_39). Briefly, RNPs with each specific gRNA molecule were electroporated into 0.2 million of human CD3+ T cells in the following final RNP concentration: 1.65 μM; 0.825 μM; 0.4125 μM; no RNPs. Following electroporation, cells were grown in T cell complete culture media with 3:1 beads to cell ratio for 6 days, and then cells were assessed by flow cytometry using an anti-HLA-DR reagent, which was used as a marker for MHC-II knock-out. Expression levels of HLA-DR at the cell surface in cells electroporated with RNP were quantitated by % of cells having positive stain (FIG. 1a) or Mean Fluorescence Intensity (FIG. 1b) relative to the levels in cells electroporated with Cas9 only but without guide RNA after 6 days culture (HLA-DR positive control) and after 3 days culture (HLA-DR basal level control). As shown in FIG. 1a, T cells with 3:1 beads activation and use of HLA-DR Ab to detect expression by FACS show that treated T cells had low HLA-DR expression after 3-day activation; HLA-DR expression is high at day 7 after activation.

[1227] The results are shown in FIG. 1. These results showed that RFXAP P3 RNP is able to decrease the number of HLA-DR+ cells at day 6 after gene editing from 48.2% to ˜12% (FIG. 1a, showing representative plot). As shown in FIG. 1b, all gRNA molecules tested were able to reduce the level of HLA-DR expression at high RNP concentration, however, RNP comprising the targeting domain of P3 was able to reduce the level of HLA-DR expression to a level which is comparable to day 3 negative control expression at all RNP concentrations tested, including down to 0.5 uM RNP. As shown in FIG. 1c, MFI also showed a significant reduction of HLA-DR by flow cytometry from all gRNAs tested, again, with RNP comprising the P3 gRNA molecule exhibiting the largest MFI reduction at all concentrations tested. These results demonstrate that targeting the transcription factor RFXAP can lead to significant reductions in surface expression of MHC-II in human T cells, and that the P3 gRNA in particular is able to achieve high levels of MHC-II reduction, including at low concentrations of RNP. Measuring percentage of HLA-DR positive cells and expression intensity of HLA-DR is useful for distinguishing gRNAs which can reduce MHC-II levels.

### Example 4. Knock-Out of MHC-II Expression Using CRISPR Systems Targeting RFX5 in Human Primary T Cells

[1228] CRISPR systems targeting RFX5 were tested to determine if they could also be used to knock out MHC-II expression in human T cells. Without being bound by theory, considering the splicing complexity of RFX5, gRNAs targeting sequences in the first expression exon, which is exon 3, were tested and expected to affect expression of all RFX5 splice variants. Further, gRNA was designed which targets a sequence that is distinct from known high-frequency SNPs in order to maximize potential applicability of our gRNAs. Thus, gRNA X5 (also “5993_3”) (comprising a targeting domain complementary to the sequence at chr1:151346184-151346353) was designed and tested for the ability to knock out MHC-II expression (as assayed by detection of HLA-DQ surface expression) in human CD3+ T cells, as described above. HLA-DR expression levels were assayed by flow cytometry in T cells electroporated with different concentrations or RNP comprising the X5 gRNA molecule (X5) and compared to levels comprising the RFXAP-targeting gRNA molecule P3 or with Cas9 without gRNA stained at day 3 after activation (negative control). The percentage of T cells positive for surface HLA-DR expression was similar in the cells receiving RNP comprising gRNA P3 or gRNA X5, with levels returning to levels detected in 3 day activated T cells (negative control) at all concentrations of RNP tested, including down to 0.5 uM, indicating that gRNAs targeting RFX5 and RFXAP are similarly able to knock-out MHC-II expression with high efficiency (FIG. 2a). Analysis of MFI showed that RFXAP has lower MFI closer to 3 day activated T cells when compared to RFX5 (FIG. 2b). This indicated that gRNA P3 can remove most of MHC-II residuals on the cell surface. Close to basal level expression implied that most of HLA-DR no longer existed after gRNA P3-induced CRISPR gene editing.

### Example 5. Comparison of Knock-Out of MHC-II Expression in Human Primary T Cells Using CRISPR Systems Targeting CIITA and RFXAP

[1229] In order to evaluate the ability of CRISPR systems targeting RFXAP to knock out or reduce MCH-II expression relative to CRISPR systems targeting another MHC-II transcription factor, CIITA, T cells were electroporated with different concentrations of RNP comprising either gRNA P3 or a CIITA-targeting gRNA comprising a targeting domain sequence of 5′-AUAGGACCAGAUGAAGUGAU-3′ (SEQ ID NO: 1867) (targeting the sequence Chr16:10898930-10898952) (referred to herein as “3007”). Briefly, human primary CD3+ T cells were electroporated on day 3 after CD3/CD28 bead activation with RNPs at the indicated concentrations containing the indicated gRNAs in dual guide format as described above. Loss of HLA-DR expression was evaluated by staining with anti-HLA-DR antibody and analysis by flow cytometry 6 days after electroporation. Both the RNP targeting CIITA and the RNP targeting RFXAP were able to achieve large reductions of HLA-DR surface expression at concentrations of 0.8 uM and above, however, the CRISPR system targeting RFXAP was able to reduce HLA-DR expression to a greater extent at the lower RNP concentrations tested (0.1 to 0.4 μM [RNP]) (FIG. 3a). MFI showed a similar trend as HLA-DR expression %, with concentrations of CIITA-targeting RNP at 0.825 uM and above able to reduce HLA-DR expression at maximum efficiency, and RFXAP-targeting RNP able to achieve maximum efficiency editing at all concentrations tested, including down to 0.103 uM (FIG. 3b).

### Example 6. CRISPR Genome Editing Towards Allogeneic T Cells by Simultaneous Knock-Out of CD3, MHC-I (by Targeting Beta-2 Microglobulin) and MHC-II (by Targeting CIITA or RFXAP)

[1230] Without being bound by theory, it is believed that an allogeneic T cell may be generated by creating populations of T cells which have reduced or eliminated surface expression of a component of the TCR (e.g., CD3), a component of MHC-I (e.g., B2M) and one or more components of MHC-II. Thus, we tested herein whether simultaneous knock-out of CD3, MHC-I and MHC-II is achievable in primary human T cells using CRISPR systems targeting TRAC, B2M, and either CIITA or RFXAP. Briefly, T cells were activated with 3:1 CD3:CD28 beads for 3 days. The activated cells were washed and re-suspended in T buffer at a concentration of 20 million/ml. All four gRNAs were used at a final concentration of 1 uM and were obtained from IDT, RNP was prepared as described before, both tracrRNA and crRNA were heated at 95 C for 2 min, cooled down back to RT, then Cas9 protein 50 uM mixed with 100 uM tracrRNA and 100 uM crRNA at 37 C for 10 min. Premixed RNP was further mixed will 20 million T cells in T buffer with final 1 uM RNP concentration. Two different groups were tested to compare the KO efficiency of a gRNA comprising a targeting domain complementary to a sequence of the constant region of the TCR alpha chain (TRAC) 961 (comprising a targeting domain sequence of AGAGUCUCUCAGCUGGUACA (SEQ ID NO: 1868)); a gRNA molecule comprising a targeting domain complementary to a target sequence of beta-2-microglobulin, 444 (comprising a targeting domain sequence of GAGUAGCGCGAGCACAGCUA (SEQ ID NO: 1869)); and either a gRNA molecule comprising the targeting domain sequence of P3 (targeting RFXAP) or a gRNA molecule comprising the targeting domain sequence of 3007 (targeting CIITA). T cells were activated by CD3/CD28 beads at beads to cell 3:1 ratio in T cell complete medium for 3 days prior to electroporation. After electroporation T cells were further cultured in T cell complete medium for another 6 days before FACS analysis to assess loss of target gene expression as assessed at Day 11 post electroporation. The results show that we were able to generate T cells having reduced and/or eliminated surface expression of TCR, MHC-I and MHC-II using the combination of CRISPR systems targeting TRAC, B2M and RFXAP or the combination of CRISPR systems targeting TRAC B2M and CIITA. In particular, these combinations were able to achieve a 97% KO efficiency for CD3, a 88-92% KO efficiency for HLA-ABC (MHC-I), and an 86% efficiency for HLA-DR (MHC-II) using the RFXAP-targeting gRNA P3 (FIG. 4a) and 88% efficiency for HLA-DR (MHC-II) using the CIITA-targeting gRNA 3007 (FIG. 4b).

### Example 7. Enhanced Reduction of MHC-II Expression by Combining CRISPR Systems Targeting CIITA and RFXAP or RFX5

[1231] To knockout MHC-II expression, CRISPR targeting CIITA was combined with CRISPR targeting another transcription factor, e.g., RFXAP or RFX5. T cell was cultured, activated, and electroporated following protocols described in previous examples. 6 days after electroporation. HLA-DR expression level is high up to 64% (FIG. 5A). Use of CIITA-targeting 3007 RNP resulted in 18% HLA-DR positive cell at 0.8M (FIG. 5B) and 1.6 uM (FIG. 5C). However, by using combined RNP as shown in FIG. 5D (CIITA with RFXAP at 0.8 uM of each RNP final concentration) and FIG. 5E (CIITA with RFX5 at 0.8 uM of each RNP final concentration), HLA-DR was decreased in remaining cells from 18% to about 3-5%.

[1232] These data demonstrate that by targeting more than one transcription factor associated with MHC-II expression, substantially higher levels of reduction of MHC-II surface expression can be achieved in human T cells. Without being bound by theory, it is believed that alternative combinations including CIITA will have similarly improved effect, for example, simultaneously targeting CIITA and RFX5 or simultaneously targeting CIITA and RFX-NK. Surprisingly, combining gRNAs targeting RFXAP and RFX5 did not yield similar reductions in MHC-II expression relative to either gRNA alone (data not shown).

### Example 8. Mixed-Donor Rejection Assay

[1233] The allogeneic triple KO CAR-T cells will be tested for specific activity, rejection and Graft vs Host Disease (GVHD) in a Mixed Lymphocyte Reaction. High purity T cells will be isolated from multiple HLA typed donors. These cells will be activated using 3:1 CD3:CD28 beads. Next day, the cells will be transduced using Lentivirus to express the CAR construct. On day 2 post transduction, the cells will be electroporated (using the protocol described above) to generate four different CARTs-CD3 single KO or CD3 and MHC I double KO or CD3 and MHC II (double KO) or CD3, MHC I and MHC II (triple KO). 4 days post electroporation, these electroporated CAR-T cells will be de-beaded to test either rejection/tolerance or GVHD in two separate settings.

[1234] Setting 1 (GvHD): CAR-T cells generated as described above in this Example (4 different kinds) will be incubated with PBMCs from a donor with at least 50% HLA mismatch at specific CAR-T:PBMC ratios. Tumor cells will be added to provide specific activation stimulus to the CAR-T cells. To differentiate between the triple KO CAR-T cells and the T cells from PBMCs, they will be labelled with CFSE yellow and CFSE violet respectively. At day 6, the cells will be stained to compare killing, proliferation, and/or cytokine production (IFNg) by the different CAR-Ts

[1235] Setting 2 (Rejection/Tolerance): PBMCs will be activated with a cocktail of IL-2/IL-15/IL-21 and CD137L overnight and incubated with CAR-Ts and tumor cells (as described in Setting 1). At day 6, the cells will be stained to compare killing, proliferation, and/or cytokine production (IFNg) by the different CAR-Ts The present disclosure is not to be limited in scope by the exemplified constructs, since the exemplified embodiments are intended to illustrate only certain aspects and any constructs that are functionally equivalent are within the scope of this disclosure. Various modifications in addition to those shown and described herein will become apparent to those skilled in the art from the foregoing description and fall within the scope of the appended claims.

[1236] It is understood that the application of the teachings to a specific problem or situation will be within the capabilities of one having ordinary skill in the art in light of the teachings contained herein.

[1237] The disclosures of each and every citation in the specification are expressly incorporated herein by reference.

[1238] To the extent there are any discrepancies between a sequence listing and any sequence recited in the specification, the sequence recited in the specification should be considered the correct sequence. Unless otherwise indicated, all genomic locations are according to hg38.

The application's sequence listing, which the Patent Office published only in electronic form, follows.

SEQUENCE LISTING (1873 sequences)

SEQ ID NO: 1 - DNA, 1184 bp, Artificial Sequence
  Description of Artificial Sequence: Synthetic polynucleotide
cgtgaggctccggtgcccgtcagtgggcagagcgcacatcgcccacagtccccgagaagttggggggaggggtcggcaattgaaccggtgcctagagaaggtggcgcggggtaaactgggaaagtgatgtcgtgtactggctccgcctttttcccgagggtgggggagaaccgtatataagtgcagtagtcgccgtgaacgttctttttcgcaacgggtttgccgccagaacacaggtaagtgccgtgtgtggttcccgcgggcctggcctctttacgggttatggcccttgcgtgccttgaattacttccacctggctgcagtacgtgattcttgatcccgagcttcgggttggaagtgggtgggagagttcgaggccttgcgcttaaggagccccttcgcctcgtgcttgagttgaggcctggcctgggcgctggggccgccgcgtgcgaatctggtggcaccttcgcgcctgtctcgctgctttcgataagtctctagccatttaaaatttttgatgacctgctgcgacgctttttttctggcaagatagtcttgtaaatgcgggccaagatctgcacactggtatttcggtttttggggccgcgggcggcgacggggcccgtgcgtcccagcgcacatgttcggcgaggcggggcctgcgagcgcggccaccgagaatcggacgggggtagtctcaagctggccggcctgctctggtgcctggcctcgcgccgccgtgtatcgccccgccctgggcggcaaggctggcccggtcggcaccagttgcgtgagcggaaagatggccgcttcccggccctgctgcagggagctcaaaatggaggacgcggcgctcgggagagcgggcgggtgagtcacccacacaaaggaaaagggcctttccgtcctcagccgtcgcttcatgtgactccacggagtaccgggcgccgtccaggcacctcgattagttctcgagcttttggagtacgtcgtctttaggttggggggaggggttttatgcgatggagtttccccacactgagtgggtggagactgaagttaggccagcttggcacttgatgtaattctccttggaatttgccctttttgagtttggatcttggttcattctcaagcctcagacagtggttcaaagtttttttcttccatttcaggtgtcgtga

SEQ ID NO: 2 - protein, 21 aa, Artificial Sequence
  Description of Artificial Sequence: Synthetic peptide
MALPVTALLLPLALLLHAARP

SEQ ID NO: 3 - DNA, 63 bp, Artificial Sequence
  Description of Artificial Sequence: Synthetic oligonucleotide
atggccctgcctgtgacagccctgctgctgcctctggctctgctgctgcatgccgctagaccc

SEQ ID NO: 4 - DNA, 63 bp, Artificial Sequence
  Description of Artificial Sequence: Synthetic oligonucleotide
atggccctccctgtcaccgccctgctgcttccgctggctcttctgctccacgccgctcggccc

SEQ ID NO: 5 - protein, 45 aa, Artificial Sequence
  Description of Artificial Sequence: Synthetic polypeptide
TTTPAPRPPTPAPTIASQPLSLRPEACRPAAGGAVHTRGLDFACD

SEQ ID NO: 6 - DNA, 135 bp, Artificial Sequence
  Description of Artificial Sequence: Synthetic polynucleotide
accacgacgccagcgccgcgaccaccaacaccggcgcccaccatcgcgtcgcagcccctgtccctgcgcccagaggcgtgccggccagcggcggggggcgcagtgcacacgagggggctggacttcgcctgtgat

SEQ ID NO: 7 - protein, 230 aa, Artificial Sequence
  Description of Artificial Sequence: Synthetic polypeptide
ESKYGPPCPPCPAPEFLGGPSVFLFPPKPKDTLMISRTPEVTCVVVDVSQEDPEVQFNWYVDGVEVHNAKTKPREEQFNSTYRVVSVLTVLHQDWLNGKEYKCKVSNKGLPSSIEKTISKAKGQPREPQVYTLPPSQEEMTKNQVSLTCLVKGFYPSDIAVEWESNGQPENNYKTTPPVLDSDGSFFLYSRLTVDKSRWQEGNVFSCSVMHEALHNHYTQKSLSLSLGKM

SEQ ID NO: 8 - DNA, 690 bp, Artificial Sequence
  Description of Artificial Sequence: Synthetic polynucleotide
gagagcaagtacggccctccctgccccccttgccctgcccccgagttcctgggcggacccagcgtgttcctgttcccccccaagcccaaggacaccctgatgatcagccggacccccgaggtgacctgtgtggtggtggacgtgtcccaggaggaccccgaggtccagttcaactggtacgtggacggcgtggaggtgcacaacgccaagaccaagccccgggaggagcagttcaatagcacctaccgggtggtgtccgtgctgaccgtgctgcaccaggactggctgaacggcaaggaatacaagtgtaaggtgtccaacaagggcctgcccagcagcatcgagaaaaccatcagcaaggccaagggccagcctcgggagccccaggtgtacaccctgccccctagccaagaggagatgaccaagaaccaggtgtccctgacctgcctggtgaagggcttctaccccagcgacatcgccgtggagtgggagagcaacggccagcccgagaacaactacaagaccaccccccctgtgctggacagcgacggcagcttcttcctgtacagccggctgaccgtggacaagagccggtggcaggagggcaacgtctttagctgctccgtgatgcacgaggccctgcacaaccactacacccagaagagcctgagcctgtccctgggcaagatg

SEQ ID NO: 9 - protein, 282 aa, Artificial Sequence
  Description of Artificial Sequence: Synthetic polypeptide
RWPESPKAQASSVPTAQPQAEGSLAKATTAPATTRNTGRGGEEKKKEKEKEEQEERETKTPECPSHTQPLGVYLLTPAVQDLWLRDKATFTCFVVGSDLKDAHLTWEVAGKVPTGGVEEGLLERHSNGSQSQHSRLTLPRSLWNAGTSVTCTLNHPSLPPQRLMALREPAAQAPVKLSLNLLASSDPPEAASWLLCEVSGFSPPNILLMWLEDQREVNTSGFAPARPPPQPGSTTFWAWSVLRVPAPPSPQPATYTCVVSHEDSRTLLNASRSLEVSYVTDH

SEQ ID NO: 10 - DNA, 847 bp, Artificial Sequence
  Description of Artificial Sequence: Synthetic polynucleotide
aggtggcccgaaagtcccaaggcccaggcatctagtgttcctactgcacagccccaggcagaaggcagcctagccaaagctactactgcacctgccactacgcgcaatactggccgtggcggggaggagaagaaaaaggagaaagagaaagaagaacaggaagagagggagaccaagacccctgaatgtccatcccatacccagccgctgggcgtctatctcttgactcccgcagtacaggacttgtggcttagagataaggccacctttacatgtttcgtcgtgggctctgacctgaaggatgcccatttgacttgggaggttgccggaaaggtacccacagggggggttgaggaagggttgctggagcgccattccaatggctctcagagccagcactcaagactcacccttccgagatccctgtggaacgccgggacctctgtcacatgtactctaaatcatcctagcctgcccccacagcgtctgatggcccttagagagccagccgcccaggcaccagttaagcttagcctgaatctgctcgccagtagtgatcccccagaggccgccagctggctcttatgcgaagtgtccggctttagcccgcccaacatcttgctcatgtggctggaggaccagcgagaagtgaacaccagcggcttcgctccagcccggcccccaccccagccgggttctaccacattctgggcctggagtgtcttaagggtcccagcaccacctagcccccagccagccacatacacctgtgttgtgtcccatgaagatagcaggaccctgctaaatgcttctaggagtctggaggtttcctacgtgactgaccatt

SEQ ID NO: 11 - protein, 10 aa, Artificial Sequence
  Description of Artificial Sequence: Synthetic peptide
GGGGSGGGGS

SEQ ID NO: 12 - DNA, 30 bp, Artificial Sequence
  Description of Artificial Sequence: Synthetic oligonucleotide
ggtggcggaggttctggaggtggaggttcc

SEQ ID NO: 13 - protein, 24 aa, Artificial Sequence
  Description of Artificial Sequence: Synthetic peptide
IYIWAPLAGTCGVLLLSLVITLYC

SEQ ID NO: 14 - DNA, 72 bp, Artificial Sequence
  Description of Artificial Sequence: Synthetic oligonucleotide
atctacatctgggcgcccttggccgggacttgtggggtccttctcctgtcactggttatcaccctttactgc

SEQ ID NO: 15 - DNA, 72 bp, Artificial Sequence
  Description of Artificial Sequence: Synthetic oligonucleotide
atctacatttgggcccctctggctggtacttgcggggtcctgctgctttcactcgtgatcactctttactgt

SEQ ID NO: 16 - protein, 42 aa, Artificial Sequence
  Description of Artificial Sequence: Synthetic polypeptide
KRGRKKLLYIFKQPFMRPVQTTQEEDGCSCRFPEEEEGGCEL

SEQ ID NO: 17 - DNA, 126 bp, Artificial Sequence
  Description of Artificial Sequence: Synthetic polynucleotide
aaacggggcagaaagaaactcctgtatatattcaaacaaccatttatgagaccagtacaaactactcaagaggaagatggctgtagctgccgatttccagaagaagaagaaggaggatgtgaactg

SEQ ID NO: 18 - DNA, 126 bp, Artificial Sequence
  Description of Artificial Sequence: Synthetic polynucleotide
aagcgcggtcggaagaagctgctgtacatctttaagcaacccttcatgaggcctgtgcagactactcaagaggaggacggctgttcatgccggttcccagaggaggaggaaggcggctgcgaactg

SEQ ID NO: 19 - protein, 48 aa, Artificial Sequence
  Description of Artificial Sequence: Synthetic polypeptide
QRRKYRSNKGESPVEPAEPCRYSCPREEEGSTIPIQEDYRKPEPACSP

SEQ ID NO: 20 - DNA, 123 bp, Artificial Sequence
  Description of Artificial Sequence: Synthetic polynucleotide
aggagtaagaggagcaggctcctgcacagtgactacatgaacatgactccccgccgccccgggcccacccgcaagcattaccagccctatgccccaccacgcgacttcgcagcctatcgctcc

SEQ ID NO: 21 - protein, 112 aa, Artificial Sequence
  Description of Artificial Sequence: Synthetic polypeptide
RVKFSRSADAPAYKQGQNQLYNELNLGRREEYDVLDKRRGRDPEMGGKPRRKNPQEGLYNELQKDKMAEAYSEIGMKGERRRGKGHDGLYQGLSTATKDTYDALHMQALPPR

SEQ ID NO: 22 - DNA, 336 bp, Artificial Sequence
  Description of Artificial Sequence: Synthetic polynucleotide
agagtgaagttcagcaggagcgcagacgcccccgcgtacaagcagggccagaaccagctctataacgagctcaatctaggacgaagagaggagtacgatgttttggacaagagacgtggccgggaccctgagatggggggaaagccgagaaggaagaaccctcaggaaggcctgtacaatgaactgcagaaagataagatggcggaggcctacagtgagattgggatgaaaggcgagcgccggaggggcaaggggcacgatggcctttaccagggtctcagtacagccaccaaggacacctacgacgcccttcacatgcaggccctgccccctcgc

SEQ ID NO: 23 - DNA, 336 bp, Artificial Sequence
  Description of Artificial Sequence: Synthetic polynucleotide
cgcgtgaaattcagccgcagcgcagatgctccagcctacaagcaggggcagaaccagctctacaacgaactcaatcttggtcggagagaggagtacgacgtgctggacaagcggagaggacgggacccagaaatgggcgggaagccgcgcagaaagaatccccaagagggcctgtacaacgagctccaaaaggataagatggcagaagcctatagcgagattggtatgaaaggggaacgcagaagaggcaaaggccacgacggactgtaccagggactcagcaccgccaccaaggacacctatgacgctcttcacatgcaggccctgccgcctcgg

SEQ ID NO: 24 - protein, 112 aa, Artificial Sequence
  Description of Artificial Sequence: Synthetic polypeptide
RVKFSRSADAPAYQQGQNQLYNELNLGRREEYDVLDKRRGRDPEMGGKPRRKNPQEGLYNELQKDKMAEAYSEIGMKGERRRGKGHDGLYQGLSTATKDTYDALHMQALPPR

SEQ ID NO: 25 - DNA, 336 bp, Artificial Sequence
  Description of Artificial Sequence: Synthetic polynucleotide
agagtgaagttcagcaggagcgcagacgcccccgcgtaccagcagggccagaaccagctctataacgagctcaatctaggacgaagagaggagtacgatgttttggacaagagacgtggccgggaccctgagatggggggaaagccgagaaggaagaaccctcaggaaggcctgtacaatgaactgcagaaagataagatggcggaggcctacagtgagattgggatgaaaggcgagcgccggaggggcaaggggcacgatggcctttaccagggtctcagtacagccaccaaggacacctacgacgcccttcacatgcaggccctgccccctcgc

SEQ ID NO: 26 - protein, 5 aa, Artificial Sequence
  Description of Artificial Sequence: Synthetic peptide
GGGGS

SEQ ID NO: 27 - skipped

SEQ ID NO: 28 - protein, 150 aa, Artificial Sequence [sequence omitted]

SEQ ID NO: 29 - DNA, 450 bp, Artificial Sequence
  Description of Artificial Sequence: Synthetic polynucleotide
cccggatggtttctggactctccggatcgcccgtggaatcccccaaccttctcaccggcactcttggttgtgactgagggcgataatgcgaccttcacgtgctcgttctccaacacctccgaatcattcgtgctgaactggtaccgcatgagcccgtcaaaccagaccgacaagctcgccgcgtttccggaagatcggtcgcaaccgggacaggattgtcggttccgcgtgactcaactgccgaatggcagagacttccacatgagcgtggtccgcgctaggcgaaacgactccgggacctacctgtgcggagccatctcgctggcgcctaaggcccaaatcaaagagagcttgagggccgaactgagagtgaccgagcgcagagctgaggtgccaactgcacatccatccccatcgcctcggcctgcggggcagtttcagaccctggtc

SEQ ID NO: 30 - protein, 394 aa, Artificial Sequence
  Description of Artificial Sequence: Synthetic polypeptide
MALPVTALLLPLALLLHAARPPGWFLDSPDRPWNPPTFSPALLVVTEGDNATFTCSFSNTSESFVLNWYRMSPSNQTDKLAAFPEDRSQPGQDCRFRVTQLPNGRDFHMSVVRARRNDSGTYLCGAISLAPKAQIKESLRAELRVTERRAEVPTAHPSPSPRPAGQFQTLVTTTPAPRPPTPAPTIASQPLSLRPEACRPAAGGAVHTRGLDFACDIYIWAPLAGTCGVLLLSLVITLYCKRGRKKLLYIFKQPFMRPVQTTQEEDGCSCRFPEEEEGGCELRVKFSRSADAPAYKQGQNQLYNELNLGRREEYDVLDKRRGRDPEMGGKPRRKNPQEGLYNELQKDKMAEAYSEIGMKGERRRGKGHDGLYQGLSTATKDTYDALHMQALPPR

SEQ ID NO: 31 - DNA, 1182 bp, Artificial Sequence
  Description of Artificial Sequence: Synthetic polynucleotide
atggccctccctgtcactgccctgcttctccccctcgcactcctgctccacgccgctagaccacccggatggtttctggactctccggatcgcccgtggaatcccccaaccttctcaccggcactcttggttgtgactgagggcgataatgcgaccttcacgtgctcgttctccaacacctccgaatcattcgtgctgaactggtaccgcatgagcccgtcaaaccagaccgacaagctcgccgcgtttccggaagatcggtcgcaaccgggacaggattgtcggttccgcgtgactcaactgccgaatggcagagacttccacatgagcgtggtccgcgctaggcgaaacgactccgggacctacctgtgcggagccatctcgctggcgcctaaggcccaaatcaaagagagcttgagggccgaactgagagtgaccgagcgcagagctgaggtgccaactgcacatccatccccatcgcctcggcctgcggggcagtttcagaccctggtcacgaccactccggcgccgcgcccaccgactccggccccaactatcgcgagccagcccctgtcgctgaggccggaagcatgccgccctgccgccggaggtgctgtgcatacccggggattggacttcgcatgcgacatctacatttgggctcctctcgccggaacttgtggcgtgctccttctgtccctggtcatcaccctgtactgcaagcggggtcggaaaaagcttctgtacattttcaagcagcccttcatgaggcccgtgcaaaccacccaggaggaggacggttgctcctgccggttccccgaagaggaagaaggaggttgcgagctgcgcgtgaagttctcccggagcgccgacgcccccgcctataagcagggccagaaccagctgtacaacgaactgaacctgggacggcgggaagagtacgatgtgctggacaagcggcgcggccgggaccccgaaatgggcgggaagcctagaagaaagaaccctcaggaaggcctgtataacgagctgcagaaggacaagatggccgaggcctactccgaaattgggatgaagggagagcggcggaggggaaaggggcacgacggcctgtaccaaggactgtccaccgccaccaaggacacatacgatgccctgcacatgcaggcccttccccctcgc

SEQ ID NO: 32 - protein, 40 aa, Artificial Sequence
  Description of Artificial Sequence: Synthetic polypeptide
  MISC_FEATURE (1)..(40): This sequence may encompass 1-10 "Gly Gly Gly Ser" repeating units
GGGSGGGSGGGSGGGSGGGSGGGSGGGSGGGSGGGSGGGS

SEQ ID NO: 33 - protein, 50 aa, Artificial Sequence
  Description of Artificial Sequence: Synthetic polypeptide
  MISC_FEATURE (1)..(50): This sequence may encompass 1-10 "Gly Gly Gly Gly Ser" repeating units
GGGGSGGGGSGGGGSGGGGSGGGGSGGGGSGGGGSGGGGSGGGGSGGGGS

SEQ ID NO: 34 - protein, 20 aa, Artificial Sequence
  Description of Artificial Sequence: Synthetic peptide
GGGGSGGGGSGGGGSGGGGS

SEQ ID NO: 35 - protein, 15 aa, Artificial Sequence
  Description of Artificial Sequence: Synthetic peptide
GGGGSGGGGSGGGGS

SEQ ID NO: 36 - protein, 4 aa, Artificial Sequence
  Description of Artificial Sequence: Synthetic peptide
GGGS

SEQ ID NO: 37 - protein, 373 aa, Artificial Sequence
  Description of Artificial Sequence: Synthetic polypeptide
PGWFLDSPDRPWNPPTFSPALLVVTEGDNATFTCSFSNTSESFVLNWYRMSPSNQTDKLAAFPEDRSQPGQDCRFRVTQLPNGRDFHMSVVRARRNDSGTYLCGAISLAPKAQIKESLRAELRVTERRAEVPTAHPSPSPRPAGQFQTLVTTTPAPRPPTPAPTIASQPLSLRPEACRPAAGGAVHTRGLDFACDIYIWAPLAGTCGVLLLSLVITLYCKRGRKKLLYIFKQPFMRPVQTTQEEDGCSCRFPEEEEGGCELRVKFSRSADAPAYKQGQNQLYNELNLGRREEYDVLDKRRGRDPEMGGKPRRKNPQEGLYNELQKDKMAEAYSEIGMKGERRRGKGHDGLYQGLSTATKDTYDALHMQALPPR

SEQ ID NO: 38 - protein, 18 aa, Artificial Sequence
  Description of Artificial Sequence: Synthetic peptide
GSTSGSGKPGSGEGSTKG

SEQ ID NO: 39-49 - skipped (11 entries)

SEQ ID NO: 50 - RNA, 12 nt, Artificial Sequence
  Description of Artificial Sequence: Synthetic oligonucleotide
guuuuagagcua

SEQ ID NO: 51 - RNA, 12 nt, Artificial Sequence
  Description of Artificial Sequence: Synthetic oligonucleotide
guuuaagagcua

SEQ ID NO: 52 - RNA, 4 nt, Artificial Sequence
  Description of Artificial Sequence: Synthetic oligonucleotide
gaaa

SEQ ID NO: 53 - RNA, 60 nt, Artificial Sequence
  Description of Artificial Sequence: Synthetic oligonucleotide
uagcaaguuaaaauaaggcuaguccguuaucaacuugaaaaaguggcaccgagucggugc

SEQ ID NO: 54 - RNA, 60 nt, Artificial Sequence
  Description of Artificial Sequence: Synthetic oligonucleotide
uagcaaguuuaaauaaggcuaguccguuaucaacuugaaaaaguggcaccgagucggugc

SEQ ID NO: 55 - RNA, 5 nt, Artificial Sequence
  Description of Artificial Sequence: Synthetic oligonucleotide
ugcug

SEQ ID NO: 56 - RNA, 5 nt, Artificial Sequence
  Description of Artificial Sequence: Synthetic oligonucleotide
cagca

SEQ ID NO: 57 - RNA, 5 nt, Artificial Sequence
  Description of Artificial Sequence: Synthetic oligonucleotide
uuuug

SEQ ID NO: 58 - RNA, 10 nt, Artificial Sequence
  Description of Artificial Sequence: Synthetic oligonucleotide
  misc_feature (1)..(10): This sequence may encompass 1-10 nucleotides
uuuuuuuuuu

SEQ ID NO: 59 - DNA, 10 bp, Artificial Sequence
  Description of Artificial Sequence: Synthetic oligonucleotide
  misc_feature (1)..(10): This sequence may encompass 1-10 nucleotides
aaaaaaaaaa

SEQ ID NO: 60 - skipped

SEQ ID NO: 61 - RNA, 13 nt, Artificial Sequence
  Description of Artificial Sequence: Synthetic oligonucleotide
uagcaaguuaaaa

SEQ ID NO: 62 - RNA, 13 nt, Artificial Sequence
  Description of Artificial Sequence: Synthetic oligonucleotide
uagcaaguuuaaa

SEQ ID NO: 63 - RNA, 47 nt, Artificial Sequence
  Description of Artificial Sequence: Synthetic oligonucleotide
uaaggcuaguccguuaucaacuugaaaaaguggcaccgagucggugc

SEQ ID NO: 64 - RNA, 51 nt, Artificial Sequence
  Description of Artificial Sequence: Synthetic oligonucleotide
uaaggcuaguccguuaucaacuugaaaaaguggcaccgagucggugcuuuu

SEQ ID NO: 65 - RNA, 74 nt, Artificial Sequence
  Description of Artificial Sequence: Synthetic oligonucleotide
aacagcauagcaaguuaaaauaaggcuaguccguuaucaacuugaaaaaguggcaccgagucggugcuuuuuuu

SEQ ID NO: 66 - RNA, 36 nt, Artificial Sequence
  Description of Artificial Sequence: Synthetic oligonucleotide
  modified_base (1)..(20): a, c, u, g, unknown or other
nnnnnnnnnnnnnnnnnnnnguuuuagagcuaugcu

SEQ ID NO: 67 - RNA, 74 nt, Artificial Sequence; identical to SEQ ID NO: 65
  Description of Artificial Sequence: Synthetic oligonucleotide

SEQ ID NO: 68 - RNA, 42 nt, Artificial Sequence
  Description of Artificial Sequence: Synthetic oligonucleotide
  modified_base (1)..(20): a, c, u, g, unknown or other
nnnnnnnnnnnnnnnnnnnnguuuuagagcuaugcuguuuug

SEQ ID NO: 69 - RNA, 100 nt, Artificial Sequence
  Description of Artificial Sequence: Synthetic polynucleotide
  modified_base (1)..(20): a, c, u, g, unknown or other
nnnnnnnnnnnnnnnnnnnnguuuuagagcuagaaauagcaaguuaaaauaaggcuaguccguuaucaacuugaaaaaguggcaccgagucggugcuuuu

SEQ ID NO: 70 - RNA, 100 nt, Artificial Sequence; identical to SEQ ID NO: 69
  Description of Artificial Sequence: Synthetic polynucleotide
  modified_base (1)..(20): a, c, u, g, unknown or other

SEQ ID NO: 71 - RNA, 76 nt, Artificial Sequence
  Description of Artificial Sequence: Synthetic oligonucleotide
guuuuagagcuagaaauagcaaguuaaaauaaggcuaguccguuaucaacuugaaaaaguggcaccgagucggugc

SEQ ID NO: 72 - RNA, 76 nt, Artificial Sequence
  Description of Artificial Sequence: Synthetic oligonucleotide
guuuaagagcuagaaauagcaaguuuaaauaaggcuaguccguuaucaacuugaaaaaguggcaccgagucggugc

SEQ ID NO: 73 - RNA, 86 nt, Artificial Sequence
  Description of Artificial Sequence: Synthetic oligonucleotide
guuuuagagcuaugcuggaaacagcauagcaaguuaaaauaaggcuaguccguuaucaacuugaaaaaguggcaccgagucggugc

SEQ ID NO: 74 - RNA, 86 nt, Artificial Sequence
  Description of Artificial Sequence: Synthetic oligonucleotide
guuuaagagcuaugcuggaaacagcauagcaaguuuaaauaaggcuaguccguuaucaacuugaaaaaguggcaccgagucggugc

SEQ ID NO: 75 - RNA, 80 nt, Artificial Sequence
  Description of Artificial Sequence: Synthetic oligonucleotide
guuuuagagcuagaaauagcaaguuaaaauaaggcuaguccguuaucaacuugaaaaaguggcaccgagucggugcuuuu

SEQ ID NO: 76 - RNA, 90 nt, Artificial Sequence
  Description of Artificial Sequence: Synthetic oligonucleotide
guuuaagagcuaugcuggaaacagcauagcaaguuuaaauaaggcuaguccguuaucaacuugaaaaaguggcaccgagucggugcuuuu

SEQ ID NO: 77 - RNA, 17 nt, Artificial Sequence
  Description of Artificial Sequence: Synthetic oligonucleotide
guuuuagagcuaugcug

SEQ ID NO: 78 - RNA, 17 nt, Artificial Sequence
  Description of Artificial Sequence: Synthetic oligonucleotide
guuuaagagcuaugcug

SEQ ID NO: 79 - RNA, 22 nt, Artificial Sequence
  Description of Artificial Sequence: Synthetic oligonucleotide
guuuuagagcuaugcuguuuug

SEQ ID NO: 80 - RNA, 22 nt, Artificial Sequence
  Description of Artificial Sequence: Synthetic oligonucleotide
guuuaagagcuaugcuguuuug

SEQ ID NO: 81 - RNA, 16 nt, Artificial Sequence
  Description of Artificial Sequence: Synthetic oligonucleotide
guuuuagagcuaugcu

SEQ ID NO: 82 - RNA, 65 nt, Artificial Sequence
  Description of Artificial Sequence: Synthetic oligonucleotide
cagcauagcaaguuaaaauaaggcuaguccguuaucaacuugaaaaaguggcaccgagucggugc

SEQ ID NO: 83 - RNA, 65 nt, Artificial Sequence
  Description of Artificial Sequence: Synthetic oligonucleotide
cagcauagcaaguuuaaauaaggcuaguccguuaucaacuugaaaaaguggcaccgagucggugc

SEQ ID NO: 84 - RNA, 74 nt, Artificial Sequence
  Description of Artificial Sequence: Synthetic oligonucleotide
aacagcauagcaaguuuaaauaaggcuaguccguuaucaacuugaaaaaguggcaccgagucggugcuuuuuuu

SEQ ID NO: 85 - RNA, 67 nt, Artificial Sequence
  Description of Artificial Sequence: Synthetic oligonucleotide
agcauagcaaguuaaaauaaggcuaguccguuaucaacuugaaaaaguggcaccgagucggugcuuu

SEQ ID NO: 86 - RNA, 85 nt, Artificial Sequence
  Description of Artificial Sequence: Synthetic oligonucleotide
guuggaaccauucaaaacagcauagcaaguuaaaauaaggcuaguccguuaucaacuugaaaaaguggcaccgagucggugcuuu

SEQ ID NO: 87 - RNA, 67 nt, Artificial Sequence
  Description of Artificial Sequence: Synthetic oligonucleotide
aacagcauagcaaguuaaaauaaggcuaguccguuaucaacuugaaaaaguggcaccgagucggugc

SEQ ID NO: 88-89 - skipped (2 entries)

SEQ ID NO: 90 - protein, 1368 aa, Artificial Sequence [sequence omitted]

SEQ ID NO: 91 - protein, 7 aa, Simian virus 40
PKKKRKV

SEQ ID NO: 92 - protein, 16 aa, Unknown
  Description of Unknown: Nucleoplasmin bipartite NLS sequence
KRPAATKKAGQAKKKK

SEQ ID NO: 93 - protein, 9 aa, Unknown
  Description of Unknown: C-myc NLS sequence
PAAKRVKLD

SEQ ID NO: 94 - protein, 11 aa, Unknown
  Description of Unknown: C-myc NLS sequence
RQRRNELKRSP

SEQ ID NO: 95 - protein, 38 aa, Homo sapiens
NQSSNFGPMKGGNFGGRSSGPYGGGGQYFAKPRNQGGY

SEQ ID NO: 96 - protein, 42 aa, Unknown
  Description of Unknown: IBB domain from importin-alpha sequence
RMRIZFKNKGKDTAELRRRRVEVSVELRKAKKDEQILKRRNV

SEQ ID NO: 97 - protein, 8 aa, Unknown
  Description of Unknown: Myoma T protein sequence
VSRKRPRP

SEQ ID NO: 98 - protein, 8 aa, Unknown
  Description of Unknown: Myoma T protein sequence
PPKKARED

SEQ ID NO: 99 - protein, 8 aa, Homo sapiens
PQPKKKPL

SEQ ID NO: 100 - protein, 12 aa, Mus musculus
SALIKKKKKMAP

SEQ ID NO: 101 - protein, 5 aa, Influenza virus
DRLRR

SEQ ID NO: 102 - protein, 7 aa, Influenza virus
PKQKKRK

SEQ ID NO: 103 - protein, 10 aa, Hepatitis delta virus
RKLKKKIKKL

SEQ ID NO: 104 - protein, 10 aa, Mus musculus
REKKKFLKRR

SEQ ID NO: 105 - protein, 20 aa, Homo sapiens
KRKGDEVDGVDEVAKKKSKK

SEQ ID NO: 106 - protein, 17 aa, Homo sapiens
RKCLQAGMNLEARKTKK

SEQ ID NO: 107 - protein, 10 aa, Artificial Sequence
  Description of Artificial Sequence: Synthetic peptide
  MISC_FEATURE (1)..(10): This sequence may encompass 3-10 residues
HHHHHHHHHH

SEQ ID NO: 108 - protein, 6 aa, Artificial Sequence
  Description of Artificial Sequence: Synthetic 6xHis tag
HHHHHH

SEQ ID NO: 109 - protein, 8 aa, Artificial Sequence
  Description of Artificial Sequence: Synthetic 8xHis tag
HHHHHHHH

SEQ ID NO: 110 - protein, 7 aa, Tobacco etch virus
ENLYFQG

SEQ ID NO: 111 - protein, 1393 aa, Artificial Sequence
  Description of Artificial Sequence: Synthetic polypeptide
MAPKKKRKVDKKYSIGLDIGTNSVGWAVITDEYKVPSKKFKVLGNTDRHSIKKNLIGALLFDSGETAEATRLKRTARRRYTRRKNRICYLQEIFSNEMAKVDDSFFHRLEESFLVEEDKKHERHPIFGNIVDEVAYHEKYPTIYHLRKKLVDSTDKADLRLIYLALAHMIKFRGHFLIEGDLNPDNSDVDKLFIQLVQTYNQLFEENPINASGVDAKAILSARLSKSRRLENLIAQLPGEKKNGLFGNLIALSLGLTPNFKSNFDLAEDAKLQLSKDTYDDDLDNLLAQIGDQYADLFLAAKNLSDAILLSDILRVNTEITKAPLSASMIKRYDEHHQDLTLLKALVRQQLPEKYKEIFFDQSKNGYAGYIDGGASQEEFYKFIKPILEKMDGTEELLVKLNREDLLRKQRTFDNGSIPHQIHLGELHAILRRQEDFYPFLKDNREKIEKILTFRIPYYVGPLARGNSRFAWMTRKSEETITPWNFEEVVDKGASAQSFIERMTNFDKNLPNEKVLPKHSLLYEYFTVYNELTKVKYVTEGMRKPAFLSGEQKKAIVDLLFKTNRKVTVKQLKEDYFKKIECFDSVEISGVEDRFNASLGTYHDLLKIIKDKDFLDNEENEDILEDIVLTLTLFEDREMIEERLKTYAHLFDDKVMKQLKRRRYTGWGRLSRKLINGIRDKQSGKTILDFLKSDGFANRNFMQLIHDDSLTFKEDIQKAQVSGQGDSLHEHIANLAGSPAIKKGILQTVKVVDELVKVMGRHKPENIVIEMARENQTTQKGQKNSRERMKRIEEGIKELGSQILKEHPVENTQLQNEKLYLYYLQNGRDMYVDQELDINRLSDYDVDHIVPQSFLKDDSIDNKVLTRSDKNRGKSDNVPSEEVVKKMKNYWRQLLNAKLITQRKFDNLTKAERGGLSELDKAGFIKRQLVETRQITKHVAQILDSRMNTKYDENDKLIREVKVITLKSKLVSDFRKDFQFYKVREINNYHHAHDAYLNAVVGTALIKKYPKLESEFVYGDYKVYDVRKMIAKSEQEIGKATAKYFFYSNIMNFFKTEITLANGEIRKRPLIETNGETGEIVWDKGRDFATVRKVLSMPQVNIVKKTEVQTGGFSKESILPKRNSDKLIARKKDWDPKKYGGFDSPTVAYSVLVVAKVEKGKSKKLKSVKELLGITIMERSSFEKNPIDFLEAKGYKEVKKDLIIKLPKYSLFELENGRKRMLASAGELQKGNELALPSKYVNFLYLASHYEKLKGSPEDNEQKQLFVEQHKHYLDEIIEQISEFSKRVILADANLDKVLSAYNKHRDKPIREQAENIIHLFTLTNLGAPAAFKYFDTTIDRKRYTSTKEVLDATLIHQSITGLYETRIDLSQLGGDSRADPKKKRKVHHHHHH

SEQ ID NO: 112 - protein, 1393 aa, Artificial Sequence
  Description of Artificial Sequence: Synthetic polypeptide
MAPKKKRKVDKKYSIGLDIGTNSVGWAVITDEYKVPSKKFKVLGNTDRHSIKKNLIGALLFDSGETAEATRLKRTARRRYTRRKNRILYLQEIFSNEMAKVDDSFFHRLEESFLVEEDKKHERHPIFGNIVDEVAYHEKYPTIYHLRKKLVDSTDKADLRLIYLALAHMIKFRGHFLIEGDLNPDNSDVDKLFIQLVQTYNQLFEENPINASGVDAKAILSARLSKSRRLENLIAQLPGEKKNGLFGNLIALSLGLTPNFKSNFDLAEDAKLQLSKDTYDDDLDNLLAQIGDQYADLFLAAKNLSDAILLSDILRVNTEITKAPLSASMIKRYDEHHQDLTLLKALVRQQLPEKYKEIFFDQSKNGYAGYIDGGASQEEFYKFIKPILEKMDGTEELLVKLNREDLLRKQRTFDNGSIPHQIHLGELHAILRRQEDFYPFLKDNREKIEKILTFRIPYYVGPLARGNSRFAWMTRKSEETITPWNFEEVVDKGASAQSFIERMTNFDKNLPNEKVLPKHSLLYEYFTVYNELTKVKYVTEGMRKPAFLSGEQKKAIVDLLFKTNRKVTVKQLKEDYFKKIEEFDSVEISGVEDRFNASLGTYHDLLKIIKDKDFLDNEENEDILEDIVLTLTLFEDREMIEERLKTYAHLFDDKVMKQLKRRRYTGWGRLSRKLINGIRDKQSGKTILDFLKSDGFANRNFMQLIHDDSLTFKEDIQKAQVSGQGDSLHEHIANLAGSPAIKKGILQTVKVVDELVKVMGRHKPENIVIEMARENQTTQKGQKNSRERMKRIEEGIKELGSQILKEHPVENTQLQNEKLYLYYLQNGRDMYVDQELDINRLSDYDVDHIVPQSFLKDDSIDNKVLTRSDKNRGKSDNVPSEEVVKKMKNYWRQLLNAKLITQRKFDNLTKAERGGLSELDKAGFIKRQLVETRQITKHVAQILDSRMNTKYDENDKLIREVKVITLKSKLVSDFRKDFQFYKVREINNYHHAHDAYLNAVVGTALIKKYPKLESEFVYGDYKVYDVRKMIAKSEQEIGKATAKYFFYSNIMNFFKTEITLANGEIRKRPLIETNGETGEIVWDKGRDFATVRKVLSMPQVNIVKKTEVQTGGFSKESILPKRNSDKLIARKKDWDPKKYGGFDSPTVAYSVLVVAKVEKGKSKKLKSVKELLGITIMERSSFEKNPIDFLEAKGYKEVKKDLIIKLPKYSLFELENGRKRMLASAGELQKGNELALPSKYVNFLYLASHYEKLKGSPEDNEQKQLFVEQHKHYLDEIIEQISEFSKRVILADANLDKVLSAYNKHRDKPIREQAENIIHLFTLTNLGAPAAFKYFDTTIDRKRYTSTKEVLDATLIHQSITGLYETRIDLSQLGGDSRADPKKKRKVHHHHHH

SEQ ID NO: 113 - protein, 1399 aa, Artificial Sequence
  Description of Artificial Sequence: Synthetic polypeptide
MGSSHHHHHHHHENLYFQGSMDKKYSIGLDIGTNSVGWAVITDEYKVPSKKFKVLGNTDRHSIKKNLIGALLFDSGETAEATRLKRTARRRYTRRKNRICYLQEIFSNEMAKVDDSFFHRLEESFLVEEDKKHERHPIFGNIVDEVAYHEKYPTIYHLRKKLVDSTDKADLRLIYLALAHMIKFRGHFLIEGDLNPDNSDVDKLFIQLVQTYNQLFEENPINASGVDAKAILSARLSKSRRLENLIAQLPGEKKNGLFGNLIALSLGLTPNFKSNFDLAEDAKLQLSKDTYDDDLDNLLAQIGDQYADLFLAAKNLSDAILLSDILRVNTEITKAPLSASMIKRYDEHHQDLTLLKALVRQQLPEKYKEIFFDQSKNGYAGYIDGGASQEEFYKFIKPILEKMDGTEELLVKLNREDLLRKQRTFDNGSIPHQIHLGELHAILRRQEDFYPFLKDNREKIEKILTFRIPYYVGPLARGNSRFAWMTRKSEETITPWNFEEVVDKGASAQSFIERMTNFDKNLPNEKVLPKHSLLYEYFTVYNELTKVKYVTEGMRKPAFLSGEQKKAIVDLLFKTNRKVTVKQLKEDYFKKIECFDSVEISGVEDRFNASLGTYHDLLKIIKDKDFLDNEENEDILEDIVLTLTLFEDREMIEERLKTYAHLFDDKVMKQLKRRRYTGWGRLSRKLINGIRDKQSGKTILDFLKSDGFANRNFMQLIHDDSLTFKEDIQKAQVSGQGDSLHEHIANLAGSPAIKKGILQTVKVVDELVKVMGRHKPENIVIEMARENQTTQKGQKNSRERMKRIEEGIKELGSQILKEHPVENTQLQNEKLYLYYLQNGRDMYVDQELDINRLSDYDVDHIVPQSFLKDDSIDNKVLTRSDKNRGKSDNVPSEEVVKKMKNYWRQLLNAKLITQRKFDNLTKAERGGLSELDKAGFIKRQLVETRQITKHVAQILDSRMNTKYDENDKLIREVKVITLKSKLVSDFRKDFQFYKVREINNYHHAHDAYLNAVVGTALIKKYPKLESEFVYGDYKVYDVRKMIAKSEQEIGKATAKYFFYSNIMNFFKTEITLANGEIRKRPLIETNGETGEIVWDKGRDFATVRKVLSMPQVNIVKKTEVQTGGFSKESILPKRNSDKLIARKKDWDPKKYGGFDSPTVAYSVLVVAKVEKGKSKKLKSVKELLGITIMERSSFEKNPIDFLEAKGYKEVKKDLIIKLPKYSLFELENGRKRMLASAGELQKGNELALPSKYVNFLYLASHYEKLKGSPEDNEQKQLFVEQHKHYLDEIIEQISEFSKRVILADANLDKVLSAYNKHRDKPIREQAENIIHLFTLTNLGAPAAFKYFDTTIDRKRYTSTKEVLDATLIHQSITGLYETRIDLSQLGGDGGGSPKKKRKV

SEQ ID NO: 114 - protein, 1396 aa, Artificial Sequence
  Description of Artificial Sequence: Synthetic polypeptide
MAHHHHHHGGSPKKKRKVDKKYSIGLDIGTNSVGWAVITDEYKVPSKKFKVLGNTDRHSIKKNLIGALLFDSGETAEATRLKRTARRRYTRRKNRICYLQEIFSNEMAKVDDSFFHRLEESFLVEEDKKHERHPIFGNIVDEVAYHEKYPTIYHLRKKLVDSTDKADLRLIYLALAHMIKFRGHFLIEGDLNPDNSDVDKLFIQLVQTYNQLFEENPINASGVDAKAILSARLSKSRRLENLIAQLPGEKKNGLFGNLIALSLGLTPNFKSNFDLAEDAKLQLSKDTYDDDLDNLLAQIGDQYADLFLAAKNLSDAILLSDILRVNTEITKAPLSASMIKRYDEHHQDLTLLKALVRQQLPEKYKEIFFDQSKNGYAGYIDGGASQEEFYKFIKPILEKMDGTEELLVKLNREDLLRKQRTFDNGSIPHQIHLGELHAILRRQEDFYPFLKDNREKIEKILTFRIPYYVGPLARGNSRFAWMTRKSEETITPWNFEEVVDKGASAQSFIERMTNFDKNLPNEKVLPKHSLLYEYFTVYNELTKVKYVTEGMRKPAFLSGEQKKAIVDLLFKTNRKVTVKQLKEDYFKKIECFDSVEISGVEDRFNASLGTYHDLLKIIKDKDFLDNEENEDILEDIVLTLTLFEDREMIEERLKTYAHLFDDKVMKQLKRRRYTGWGRLSRKLINGIRDKQSGKTILDFLKSDGFANRNFMQLIHDDSLTFKEDIQKAQVSGQGDSLHEHIANLAGSPAIKKGILQTVKVVDELVKVMGRHKPENIVIEMARENQTTQKGQKNSRERMKRIEEGIKELGSQILKEHPVENTQLQNEKLYLYYLQNGRDMYVDQELDINRLSDYDVDHIVPQSFLKDDSIDNKVLTRSDKNRGKSDNVPSEEVVKKMKNYWRQLLNAKLITQRKFDNLTKAERGGLSELDKAGFIKRQLVETRQITKHVAQILDSRMNTKYDENDKLIREVKVITLKSKLVSDFRKDFQFYKVREINNYHHAHDAYLNAVVGTALIKKYPKLESEFVYGDYKVYDVRKMIAKSEQEIGKATAKYFFYSNIMNFFKTEITLANGEIRKRPLIETNGETGEIVWDKGRDFATVRKVLSMPQVNIVKKTEVQTGGFSKESILPKRNSDKLIARKKDWDPKKYGGFDSPTVAYSVLVVAKVEKGKSKKLKSVKELLGITIMERSSFEKNPIDFLEAKGYKEVKKDLIIKLPKYSLFELENGRKRMLASAGELQKGNELALPSKYVNFLYLASHYEKLKGSPEDNEQKQLFVEQHKHYLDEIIEQISEFSKRVILADANLDKVLSAYNKHRDKPIREQAENIIHLFTLTNLGAPAAFKYFDTTIDRKRYTSTKEVLDATLIHQSITGLYETRIDLSQLGGDSRADPKKKRKV

SEQ ID NO: 115 - protein, 1386 aa, Artificial Sequence
  Description of Artificial Sequence: Synthetic polypeptide
MAPKKKRKVDKKYSIGLDIGTNSVGWAVITDEYKVPSKKFKVLGNTDRHSIKKNLIGALLFDSGETAEATRLKRTARRRYTRRKNRICYLQEIFSNEMAKVDDSFFHRLEESFLVEEDKKHERHPIFGNIVDEVAYHEKYPTIYHLRKKLVDSTDKADLRLIYLALAHMIKFRGHFLIEGDLNPDNSDVDKLFIQLVQTYNQLFEENPINASGVDAKAILSARLSKSRRLENLIAQLPGEKKNGLFGNLIALSLGLTPNFKSNFDLAEDAKLQLSKDTYDDDLDNLLAQIGDQYADLFLAAKNLSDAILLSDILRVNTEITKAPLSASMIKRYDEHHQDLTLLKALVRQQLPEKYKEIFFDQSKNGYAGYIDGGASQEEFYKFIKPILEKMDGTEELLVKLNREDLLRKQRTFDNGSIPHQIHLGELHAILRRQEDFYPFLKDNREKIEKILTFRIPYYVGPLARGNSRFAWMTRKSEETITPWNFEEVVDKGASAQSFIERMTNFDKNLPNEKVLPKHSLLYEYFTVYNELTKVKYVTEGMRKPAFLSGEQKKAIVDLLFKTNRKVTVKQLKEDYFKKIECFDSVEISGVEDRFNASLGTYHDLLKIIKDKDFLDNEENEDILEDIVLTLTLFEDREMIEERLKTYAHLFDDKVMKQLKRRRYTGWGRLSRKLINGIRDKQSGKTILDFLKSDGFANRNFMQLIHDDSLTFKEDIQKAQVSGQGDSLHEHIANLAGSPAIKKGILQTVKVVDELVKVMGRHKPENIVIEMARENQTTQKGQKNSRERMKRIEEGIKELGSQILKEHPVENTQLQNEKLYLYYLQNGRDMYVDQELDINRLSDYDVDHIVPQSFLKDDSIDNKVLTRSDKNRGKSDNVPSEEVVKKMKNYWRQLLNAKLITQRKFDNLTKAERGGLSELDKAGFIKRQLVETRQITKHVAQILDSRMNTKYDENDKLIREVKVITLKSKLVSDFRKDFQFYKVREINNYHHAHDAYLNAVVGTALIKKYPKLESEFVYGDYKVYDVRKMIAKSEQEIGKATAKYFFYSNIMNFFKTEITLANGEIRKRPLIETNGETGEIVWDKGRDFATVRKVLSMPQVNIVKKTEVQTGGFSKESILPKRNSDKLIARKKDWDPKKYGGFDSPTVAYSVLVVAKVEKGKSKKLKSVKELLGITIMERSSFEKNPIDFLEAKGYKEVKKDLIIKLPKYSLFELENGRKRMLASAGELQKGNELALPSKYVNFLYLASHYEKLKGSPEDNEQKQLFVEQHKHYLDEIIEQISEFSKRVILADANLDKVLSAYNKHRDKPIREQAENIIHLFTLTNLGAPAAFKYFDTTIDRKRYTSTKEVLDATLIHQSITGLYETRIDLSQLGGDSRADHHHHHH

SEQ ID NO: 116 - protein, 1389 aa, Artificial Sequence
  Description of Artificial Sequence: Synthetic polypeptide
MAHHHHHHGGSDKKYSIGLDIGTNSVGWAVITDEYKVPSKKFKVLGNTDRHSIKKNLIGALLFDSGETAEATRLKRTARRRYTRRKNRICYLQEIFSNEMAKVDDSFFHRLEESFLVEEDKKHERHPIFGNIVDEVAYHEKYPTIYHLRKKLVDSTDKADLRLIYLALAHMIKFRGHFLIEGDLNPDNSDVDKLFIQLVQTYNQLFEENPINASGVDAKAILSARLSKSRRLENLIAQLPGEKKNGLFGNLIALSLGLTPNFKSNFDLAEDAKLQLSKDTYDDDLDNLLAQIGDQYADLFLAAKNLSDAILLSDILRVNTEITKAPLSASMIKRYDEHHQDLTLLKALVRQQLPEKYKEIFFDQSKNGYAGYIDGGASQEEFYKFIKPILEKMDGTEELLVKLNREDLLRKQRTFDNGSIPHQIHLGELHAILRRQEDFYPFLKDNREKIEKILTFRIPYYVGPLARGNSRFAWMTRKSEETITPWNFEEVVDKGASAQSFIERMTNFDKNLPNEKVLPKHSLLYEYFTVYNELTKVKYVTEGMRKPAFLSGEQKKAIVDLLFKTNRKVTVKQLKEDYFKKIECFDSVEISGVEDRFNASLGTYHDLLKIIKDKDFLDNEENEDILEDIVLTLTLFEDREMIEERLKTYAHLFDDKVMKQLKRRRYTGWGRLSRKLINGIRDKQSGKTILDFLKSDGFANRNFMQLIHDDSLTFKEDIQKAQVSGQGDSLHEHIANLAGSPAIKKGILQTVKVVDELVKVMGRHKPENIVIEMARENQTTQKGQKNSRERMKRIEEGIKELGSQILKEHPVENTQLQNEKLYLYYLQNGRDMYVDQELDINRLSDYDVDHIVPQSFLKDDSIDNKVLTRSDKNRGKSDNVPSEEVVKKMKNYWRQLLNAKLITQRKFDNLTKAERGGLSELDKAGFIKRQLVETRQITKHVAQILDSRMNTKYDENDKLIREVKVITLKSKLVSDFRKDFQFYKVREINNYHHAHDAYLNAVVGTALIKKYPKLESEFVYGDYKVYDVRKMIAKSEQEIGKATAKYFFYSNIMNFFKTEITLANGEIRKRPLIETNGETGEIVWDKGRDFATVRKVLSMPQVNIVKKTEVQTGGFSKESILPKRNSDKLIARKKDWDPKKYGGFDSPTVAYSVLVVAKVEKGKSKKLKSVKELLGITIMERSSFEKNPIDFLEAKGYKEVKKDLIIKLPKYSLFELENGRKRMLASAGELQKGNELALPSKYVNFLYLASHYEKLKGSPEDNEQKQLFVEQHKHYLDEIIEQISEFSKRVILADANLDKVLSAYNKHRDKPIREQAENIIHLFTLTNLGAPAAFKYFDTTIDRKRYTSTKEVLDATLIHQSITGLYETRIDLSQLGGDSRADPKKKRKV

SEQ ID NO: 117 - protein, 1399 aa, Artificial Sequence; identical to SEQ ID NO: 113
  Description of Artificial Sequence: Synthetic polypeptide

SEQ ID NO: 118 - protein, 1393 aa, Artificial Sequence
  Description of Artificial Sequence: Synthetic polypeptide
MAPKKKRKVDKKYSIGLDIGTNSVGWAVITDEYKVPSKKFKVLGNTDRHSIKKNLIGALLFDSGETAEATRLKRTARRRYTRRKNRICYLQEIFSNEMAKVDDSFFHRLEESFLVEEDKKHERHPIFGNIVDEVAYHEKYPTIYHLRKKLVDSTDKADLRLIYLALAHMIKFRGHFLIEGDLNPDNSDVDKLFIQLVQTYNQLFEENPINASGVDAKAILSARLSKSRRLENLIAQLPGEKKNGLFGNLIALSLGLTPNFKSNFDLAEDAKLQLSKDTYDDDLDNLLAQIGDQYADLFLAAKNLSDAILLSDILRVNTEITKAPLSASMIKRYDEHHQDLTLLKALVRQQLPEKYKEIFFDQSKNGYAGYIDGGASQEEFYKFIKPILEKMDGTEELLVKLNREDLLRKQRTFDNGSIPHQIHLGELHAILRRQEDFYPFLKDNREKIEKILTFRIPYYVGPLARGNSRFAWMTRKSEETITPWNFEEVVDKGASAQSFIERMTNFDKNLPNEKVLPKHSLLYEYFTVYNELTKVKYVTEGMRKPAFLSGEQKKAIVDLLFKTNRKVTVKQLKEDYFKKIECFDSVEISGVEDRFNASLGTYHDLLKIIKDKDFLDNEENEDILEDIVLTLTLFEDREMIEERLKTYAHLFDDKVMKQLKRRRYTGWGRLSRKLINGIRDKQSGKTILDFLKSDGFANRNFMQLIHDDSLTFKEDIQKAQVSGQGDSLHEHIANLAGSPAIKKGILQTVKVVDELVKVMGRHKPENIVIEMARENQTTQKGQKNSRERMKRIEEGIKELGSQILKEHPVENTQLQNEKLYLYYLQNGRDMYVDQELDINRLSDYDVDHIVPQSFLKDDSIDNAVLTRSDKNRGKSDNVPSEEVVKKMKNYWRQLLNAKLITQRKFDNLTKAERGGLSELDKAGFIKRQLVETRQITKHVAQILDSRMNTKYDENDKLIREVKVITLKSKLVSDFRKDFQFYKVREINNYHHAHDAYLNAVVGTALIKKYPKLESEFVYGDYKVYDVRKMIAKSEQEIGKATAKYFFYSNIMNFFKTEITLANGEIRKRPLIETNGETGEIVWDKGRDFATVRKVLSMPQVNIVKKTEVQTGGFSKESILPKRNSDKLIARKKDWDPKKYGGFDSPTVAYSVLVVAKVEKGKSKKLKSVKELLGITIMERSSFEKNPIDFLEAKGYKEVKKDLIIKLPKYSLFELENGRKRMLASAGELQKGNELALPSKYVNFLYLASHYEKLKGSPEDNEQKQLFVEQHKHYLDEIIEQISEFSKRVILADANLDKVLSAYNKHRDKPIREQAENIIHLFTLTNLGAPAAFKYFDTTIDRKRYTSTKEVLDATLIHQSITGLYETRIDLSQLGGDSRADPKKKRKVHHHHHH

SEQ ID NO: 119 - protein, 1393 aa, Artificial Sequence
  Description of Artificial Sequence: Synthetic polypeptide
MAPKKKRKVDKKYSIGLDIGTNSVGWAVITDEYKVPSKKFKVLGNTDRHSIKKNLIGALLFDSGETAEATRLKRTARRRYTRRKNRICYLQEIFSNEMAKVDDSFFHRLEESFLVEEDKKHERHPIFGNIVDEVAYHEKYPTIYHLRKKLVDSTDKADLRLIYLALAHMIKFRGHFLIEGDLNPDNSDVDKLFIQLVQTYNQLFEENPINASGVDAKAILSARLSKSRRLENLIAQLPGEKKNGLFGNLIALSLGLTPNFKSNFDLAEDAKLQLSKDTYDDDLDNLLAQIGDQYADLFLAAKNLSDAILLSDILRVNTEITKAPLSASMIKRYDEHHQDLTLLKALVRQQLPEKYKEIFFDQSKNGYAGYIDGGASQEEFYKFIKPILEKMDGTEELLVKLNREDLLRKQRTFDNGSIPHQIHLGELHAILRRQEDFYPFLKDNREKIEKILTFRIPYYVGPLARGNSRFAWMTRKSEETITPWNFEEVVDKGASAQSFIERMTNFDKNLPNEKVLPKHSLLYEYFTVYNELTKVKYVTEGMRKPAFLSGEQKKAIVDLLFKTNRKVTVKQLKEDYFKKIECFDSVEISGVEDRFNASLGTYHDLLKIIKDKDFLDNEENEDILEDIVLTLTLFEDREMIEERLKTYAHLFDDKVMKQLKRRRYTGWGRLSRKLINGIRDKQSGKTILDFLKSDGFANRNFMQLIHDDSLTFKEDIQKAQVSGQGDSLHEHIANLAGSPAIKKGILQTVKVVDELVKVMGRHKPENIVIEMARENQTTQKGQKNSRERMKRIEEGIKELGSQILKEHPVENTQLQNEALYLYYLQNGRDMYVDQELDINRLSDYDVDHIVPQSFLKDDSIDNKVLTRSDKNRGKSDNVPSEEVVKKMKNYWRQLLNAKLITQRKFDNLTKAERGGLSELDKAGFIKRQLVETRQITKHVAQILDSRMNTKYDENDKLIREVKVITLKSKLVSDFRKDFQFYKVREINNYHHAHDAYLNAVVGTALIKKYPALESEFVYGDYKVYDVRKMIAKSEQEIGKATAKYFFYSNIMNFFKTEITLANGEIRKAPLIETNGETGEIVWDKGRDFATVRKVLSMPQVNIVKKTEVQTGGFSKESILPKRNSDKLIARKKDWDPKKYGGFDSPTVAYSVLVVAKVEKGKSKKLKSVKELLGITIMERSSFEKNPIDFLEAKGYKEVKKDLIIKLPKYSLFELENGRKRMLASAGELQKGNELALPSKYVNFLYLASHYEKLKGSPEDNEQKQLFVEQHKHYLDEIIEQISEFSKRVILADANLDKVLSAYNKHRDKPIREQAENIIHLFTLTNLGAPAAFKYFDTTIDRKRYTSTKEVLDATLIHQSITGLYETRIDLSQLGGDSRADPKKKRKVHHHHHH

SEQ ID NO: 120 - protein, 1393 aa, Artificial Sequence
  Description of Artificial Sequence: Synthetic polypeptide
MAPKKKRKVDKKYSIGLDIGTNSVGWAVITDEYKVPSKKFKVLGNTDRHSIKKNLIGALLFDSGETAEATRLKRTARRRYTRRKNRICYLQEIFSNEMAKVDDSFFHRLEESFLVEEDKKHERHPIFGNIVDEVAYHEKYPTIYHLRKKLVDSTDKADLRLIYLALAHMIKFRGHFLIEGDLNPDNSDVDKLFIQLVQTYNQLFEENPINASGVDAKAILSARLSKSRRLENLIAQLPGEKKNGLFGNLIALSLGLTPNFKSNFDLAEDAKLQLSKDTYDDDLDNLLAQIGDQYADLFLAAKNLSDAILLSDILRVNTEITKAPLSASMIKRYDEHHQDLTLLKALVRQQLPEKYKEIFFDQSKNGYAGYIDGGASQEEFYKFIKPILEKMDGTEELLVKLNREDLLRKQRTFDNGSIPHQIHLGELHAILRRQEDFYPFLKDNREKIEKILTFRIPYYVGPLARGNSRFAWMTRKSEETITPWNFEEVVDKGASAQSFIERMTNFDKNLPNEKVLPKHSLLYEYFTVYNELTKVKYVTEGMRKPAFLSGEQKKAIVDLLFKTNRKVTVKQLKEDYFKKIECFDSVEISGVEDRFNASLGTYHDLLKIIKDKDFLDNEENEDILEDIVLTLTLFEDREMIEERLKTYAHLFDDKVMKQLKRRRYTGWGRLSRKLINGIRDKQSGKTILDFLKSDGFANRNFMQLIHDDSLTFKEDIQKAQVSGQGDSLHEHIANLAGSPAIKKGILQTVKVVDELVKVMGRHKPENIVIEMARENQTTQKGQKNSRERMKRIEEGIKELGSQILKEHPVENTQLQNEKLYLYYLQNGRDMYVDQELDINRLSDYDVDHIVPQSFLADDSIDNKVLTRSDKNRGKSDNVPSEEVVKKMKNYWRQLLNAKLITQRKFDNLTKAERGGLSELDKAGFIKRQLVETRQITKHVAQILDSRMNTKYDENDKLIREVKVITLKSKLVSDFRKDFQFYKVREINNYHHAHDAYLNAVVGTALIKKYPALESEFVYGDYKVYDVRKMIAKSEQEIGKATAKYFFYSNIMNFFKTEITLANGEIRKAPLIETNGETGEIVWDKGRDFATVRKVLSMPQVNIVKKTEVQTGGFSKESILPKRNSDKLIARKKDWDPKKYGGFDSPTVAYSVLVVAKVEKGKSKKLKSVKELLGITIMERSSFEKNPIDFLEAKGYKEVKKDLIIKLPKYSLFELENGRKRMLASAGELQKGNELALPSKYVNFLYLASHYEKLKGSPEDNEQKQLFVEQHKHYLDEIIEQISEFSKRVILADANLDKVLSAYNKHRDKPIREQAENIIHLFTLTNLGAPAAFKYFDTTIDRKRYTSTKEVLDATLIHQSITGLYETRIDLSQLGGDSRADPKKKRKVHHHHHH

SEQ ID NO: 121 - protein, 1393 aa, Artificial Sequence
  Description of Artificial Sequence: Synthetic polypeptide
MAPKKKRKVDKKYSIGLDIGTNSVGWAVITDEYKVPSKKFKVLGNTDRHSIKKNLIGALLFDSGETAEATRLKRTARRRYTRRKNRICYLQEIFSNEMAKVDDSFFHRLEESFLVEEDKKHERHPIFGNIVDEVAYHEKYPTIYHLRKKLVDSTDKADLRLIYLALAHMIKFRGHFLIEGDLNPDNSDVDKLFIQLVQTYNQLFEENPINASGVDAKAILSARLSKSRRLENLIAQLPGEKKNGLFGNLIALSLGLTPNFKSNFDLAEDAKLQLSKDTYDDDLDNLLAQIGDQYADLFLAAKNLSDAILLSDILRVNTEITKAPLSASMIKRYDEHHQDLTLLKALVRQQLPEKYKEIFFDQSKNGYAGYIDGGASQEEFYKFIKPILEKMDGTEELLVKLNREDLLRKQRTFDNGSIPHQIHLGELHAILRRQEDFYPFLKDNREKIEKILTFRIPYYVGPLARGNSRFAWMTRKSEETITPWNFEEVVDKGASAQSFIERMTAFDKNLPNEKVLPKHSLLYEYFTVYNELTKVKYVTEGMRKPAFLSGEQKKAIVDLLFKTNRKVTVKQLKEDYFKKIECFDSVEISGVEDRFNASLGTYHDLLKIIKDKDFLDNEENEDILEDIVLTLTLFEDREMIEERLKTYAHLFDDKVMKQLKRRRYTGWGALSRKLINGIRDKQSGKTILDFLKSDGFANRNFMALIHDDSLTFKEDIQKAQVSGQGDSLHEHIANLAGSPAIKKGILQTVKVVDELVKVMGRHKPENIVIEMARENQTTQKGQKNSRERMKRIEEGIKELGSQILKEHPVENTQLQNEKLYLYYLQNGRDMYVDQELDINRLSDYDVDHIVPQSFLKDDSIDNKVLTRSDKNRGKSDNVPSEEVVKKMKNYWRQLLNAKLITQRKFDNLTKAERGGLSELDKAGFIKRQLVETRAITKHVAQILDSRMNTKYDENDKLIREVKVITLKSKLVSDFRKDFQFYKVREINNYHHAHDAYLNAVVGTALIKKYPKLESEFVYGDYKVYDVRKMIAKSEQEIGKATAKYFFYSNIMNFFKTEITLANGEIRKRPLIETNGETGEIVWDKGRDFATVRKVLSMPQVNIVKKTEVQTGGFSKESILPKRNSDKLIARKKDWDPKKYGGFDSPTVAYSVLVVAKVEKGKSKKLKSVKELLGITIMERSSFEKNPIDFLEAKGYKEVKKDLIIKLPKYSLFELENGRKRMLASAGELQKGNELALPSKYVNFLYLASHYEKLKGSPEDNEQKQLFVEQHKHYLDEIIEQISEFSKRVILADANLDKVLSAYNKHRDKPIREQAENIIHLFTLTNLGAPAAFKYFDTTIDRKRYTSTKEVLDATLIHQSITGLYETRIDLSQLGGDSRADPKKKRKVHHHHHH

SEQ ID NO: 122 - DNA, 4107 bp, Artificial Sequence
  Description of Artificial Sequence: Synthetic polynucleotide
atggataaaaagtacagcatcgggctggacatcggtacaaactcagtggggtgggccgtgattacggacgagtacaaggtaccctccaaaaaatttaaagtgctgggtaacacggacagacactctataaagaaaaatcttattggagccttgctgttcgactcaggcgagacagccgaagccacaaggttgaagcggaccgccaggaggcggtataccaggagaaagaaccgcatatgctacctgcaagaaatcttcagtaacgagatggcaaaggttgacgatagctttttccatcgcctggaagaatcctttcttgttgaggaagacaagaagcacgaacggcaccccatctttggcaatattgtcgacgaagtggcatatcacgaaaagtacccgactatctaccacctcaggaagaagctggtggactctaccgataaggcggacctcagacttatttatttggcactcgcccacatgattaaatttagaggacatttcttgatcgagggcgacctgaacccggacaacagtgacgtcgataagctgttcatccaacttgtgcagacctacaatcaactgttcgaagaaaaccctataaatgcttcaggagtcgacgctaaagcaatcctgtccgcgcgcctctcaaaatctagaagacttgagaatctgattgctcagttgcccggggaaaagaaaaatggattgtttggcaacctgatcgccctcagtctcggactgaccccaaatttcaaaagtaacttcgacctggccgaagacgctaagctccagctgtccaaggacacatacgatgacgacctcgacaatctgctggcccagattggggatcagtacgccgatctctttttggcagcaaagaacctgtccgacgccatcctgttgagcgatatcttgagagtgaacaccgaaattactaaagcaccccttagcgcatctatgatcaagcggtacgacgagcatcatcaggatctgaccctgctgaaggctcttgtgaggcaacagctccccgaaaaatacaaggaaatcttctttgaccagagcaaaaacggctacgctggctatatagatggtggggccagtcaggaggaattctataaattcatcaagcccattctcgagaaaatggacggcacagaggagttgctggtcaaacttaacagggaggacctgctgcggaagcagcggacctttgacaacgggtctatcccccaccagattcatctgggcgaactgcacgcaatcctgaggaggcaggaggatttttatccttttcttaaagataaccgcgagaaaatagaaaagattcttacattcaggatcccgtactacgtgggacctctcgcccggggcaattcacggtttgcctggatgacaaggaagtcagaggagactattacaccttggaacttcgaagaagtggtggacaagggtgcatctgcccagtctttcatcgagcggatgacaaattttgacaagaacctccctaatgagaaggtgctgcccaaacattctctgctctacgagtactttaccgtctacaatgaactgactaaagtcaagtacgtcaccgagggaatgaggaagccggcattccttagtggagaacagaagaaggcgattgtagacctgttgttcaagaccaacaggaaggtgactgtgaagcaacttaaagaagactactttaagaagatcgaatgttttgacagtgtggaaatttcaggggttgaagaccgcttcaatgcgtcattggggacttaccatgatcttctcaagatcataaaggacaaagacttcctggacaacgaagaaaatgaggatattctcgaagacatcgtcctcaccctgaccctgttcgaagacagggaaatgatagaagagcgcttgaaaacctatgcccacctcttcgacgataaagttatgaagcagctgaagcgcaggagatacacaggatggggaagattgtcaaggaagctgatcaatggaattagggataaacagagtggcaagaccatactggatttcctcaaatctgatggcttcgccaataggaacttcatgcaactgattcacgatgactctcttaccttcaaggaggacattcaaaaggctcaggtgagcgggcagggagactcccttcatgaacacatcgcgaatttggcaggttcccccgctattaaaaagggcatccttcaaactgtcaaggtggtggatgaattggtcaaggtaatgggcagacataagccagaaaatattgtgatcgagatggcccgcgaaaaccagaccacacagaagggccagaaaaatagtagagagcggatgaagaggatcgaggagggcatcaaagagctgggatctcagattctcaaagaacaccccgtagaaaacacacagctgcagaacgaaaaattgtacttgtactatctgcagaacggcagagacatgtacgtcgaccaagaacttgatattaatagactgtccgactatgacgtagaccatatcgtgccccagtccttcctgaaggacgactccattgataacaaagtcttgacaagaagcgacaagaacaggggtaaaagtgataatgtgcctagcgaggaggtggtgaaaaaaatgaagaactactggcgacagctgcttaatgcaaagctcattacacaacggaagttcgataatctgacgaaagcagagagaggtggcttgtctgagttggacaaggcagggtttattaagcggcagctggtggaaactaggcagatcacaaagcacgtggcgcagattttggacagccggatgaacacaaaatacgacgaaaatgataaactgatacgagaggtcaaagttatcacgctgaaaagcaagctggtgtccgattttcggaaagacttccagttctacaaagttcgcgagattaataactaccatcatgctcacgatgcgtacctgaacgctgttgtcgggaccgccttgataaagaagtacccaaagctggaatccgagttcgtatacggggattacaaagtgtacgatgtgaggaaaatgatagccaagtccgagcaggagattggaaaggccacagctaagtacttcttttattctaacatcatgaatttttttaagacggaaattaccctggccaacggagagatcagaaagcggccccttatagagacaaatggtgaaacaggtgaaatcgtctgggataagggcagggatttcgctactgtgaggaaggtgctgagtatgccacaggtaaatatcgtgaaaaaaaccgaagtacagaccggaggattttccaaggaaagcattttgcctaaaagaaactcagacaagctcatcgcccgcaagaaagattgggaccctaagaaatacgggggatttgactcacccaccgtagcctattctgtgctggtggtagctaaggtggaaaaaggaaagtctaagaagctgaagtccgtgaaggaactcttgggaatcactatcatggaaagatcatcctttgaaaagaaccctatcgatttcctggaggctaagggttacaaggaggtcaagaaagacctcatcattaaactgccaaaatactctctcttcgagctggaaaatggcaggaagagaatgttggccagcgccggagagctgcaaaagggaaacgagcttgctctgccctccaaatatgttaattttctctatctcgcttcccactatgaaaagctgaaagggtctcccgaagataacgagcagaagcagctgttcgtcgaacagcacaagcactatctggatgaaataatcgaacaaataagcgagttcagcaaaagggttatcctggcggatgctaatttggacaaagtactgtctgcttataacaagcaccgggataagcctattagggaacaagccgagaatataattcacctctttacactcacgaatctcggagcccccgccgccttcaaatactttgatacgactatcgaccggaaacggtataccagtaccaaagaggtcctcgatgccaccctcatccaccagtcaattactggcctgtacgaaacacggatcgacctctctcaactgggcggcgactag

SEQ ID NO: 123-129 - skipped (7 entries)

SEQ ID NO: 130 - protein, 21 aa, Thosea asigna virus
  MISC_FEATURE (1)..(3): This region may or may not be present
GSGEGRGSLLTCGDVEENPGP

SEQ ID NO: 131 - protein, 22 aa, Porcine teschovirus-1
  MISC_FEATURE (1)..(3): This region may or may not be present
GSGATNFSLLKQAGDVEENPGP

SEQ ID NO: 132 - protein, 23 aa, Equine rhinitis A virus
  MISC_FEATURE (1)..(3): This region may or may not be present
GSGQCTNYALLKLAGDVESNPGP

SEQ ID NO: 133 - protein, 25 aa, Foot and mouth disease virus
  MISC_FEATURE (1)..(3): This region may or may not be present
GSGVKQTLNFDLLKLAGDVESNPGP

SEQ ID NO: 134-149 - skipped (16 entries)

SEQ ID NO: 150 - protein, 243 aa, Artificial Sequence
  Description of Artificial Sequence: Synthetic polypeptide
QVQLVQSGAEVKKPGASVKVSCKASGYTFTGYYMHWVRQAPGQGLEWMGWINPNSGGTNYAQKFQGRVTMTRDTSISTAYMELSRLRSDDTAVYYCARDMNILATVPFDIWGQGTMVTVSSGGGGSGGGGSGGGGSDIQMTQSPSSLSASVGDRVTITCRASQSISTYLNWYQQKPGKAPNLLIYAAFSLQSGVPSRFSGSGSGTDFTLTINSLQPEDFATYYCQQGDSVPLTFGGGTKLEIK

SEQ ID NO: 151 - protein, 243 aa, Artificial Sequence
  Description of Artificial Sequence: Synthetic polypeptide
QVQLVQSGAEVKKPGASVKVSCKASGYTFTGYYMHWVRQAPGQGLEWMGWINPNSGGTNYAQKFQGRVTLTRDTSISTVYMELSRLRSDDTAVYYCARDMNILATVPFDIWGQGTMVTVSSGGGGSGGGGSGGGGSDIQMTQSPSSLSASVGDRVTITCRASQSISSYLNWYQQKPGKAPKLLIYAASSLQSGVPSRFSGSGSGTDFTLTVNSLQPEDFATYYCQQGDSVPLTFGGGTRLEIK

SEQ ID NO: 152 - skipped

SEQ ID NO: 153 - protein, 243 aa, Artificial Sequence
  Description of Artificial Sequence: Synthetic polypeptide
QVQLVQSGAEVKKPGASVKVSCKASGYIFTGYYIHWVRQAPGQGLEWMGWINPNSGGTNYAQKFQGRVTMTRDTSISTAYMELSGLRSDDPAVYYCARDMNILATVPFDIWGQGTLVTVSSGGGGSGGGGSGGGGSDIQLTQSPSSLSASVGDRVTITCRASQSISSYLNWYQQKPGKAPKLLIYAASSLQSGVPSRFSGSGSGTDFTLTVNSLQPEDFATYYCQQGDSVPLTFGGGTKVEIK

SEQ ID NO: 154 - protein, 245 aa, Artificial Sequence
  Description of Artificial Sequence: Synthetic polypeptide
QVQLQQSGAEVKKSGASVKVSCKASGYTFTDYYMHWLRQAPGQGLEWMGWINPNSGDTNYAQKFQGRVTLTRDTSISTVYMELSRLRSDDTAVYYCARDMNILATVPFDIWGQGTMVTVSSASGGGGSGGRASGGGGSDIQMTQSPSSLSASVGDRVTITCRASQSISSYLNWYQQKPGKAPKLLIYAASSLQSGVPSRFSGSGSGTDFTLTISSLQPEDFATYYCQQGDSVPLTFGGGTKVEIK

SEQ ID NO: 155 - protein, 487 aa, Artificial Sequence
  Description of Artificial Sequence: Synthetic polypeptide
MALPVTALLLPLALLLHAARPQVQLVQSGAEVKKPGASVKVSCKASGYTFTGYYMHWVRQAPGQGLEWMGWINPNSGGTNYAQKFQGRVTLTRDTSISTVYMELSRLRSDDTAVYYCARDMNILATVPFDIWGQGTMVTVSSGGGGSGGGGSGGGGSDIQMTQSPSSLSASVGDRVTITCRASQSISSYLNWYQQKPGKAPKLLIYAASSLQSGVPSRFSGSGSGTDFTLTVNSLQPEDFATYYCQQGDSVPLTFGGGTRLEIKTTTPAPRPPTPAPTIASQPLSLRPEACRPAAGGAVHTRGLDFACDIYIWAPLAGTCGVLLLSLVITLYCKRGRKKLLYIFKQPFMRPVQTTQEEDGCSCRFPEEEEGGCELRVKFSRSADAPAYKQGQNQLYNELNLGRREEYDVLDKRRGRDPEMGGKPRRKNPQEGLYNELQKDKMAEAYSEIGMKGERRRGKGHDGLYQGLSTATKDTYDALHMQALPPR

SEQ ID NO: 156 - protein, 487 aa, Artificial Sequence
  Description of Artificial Sequence: Synthetic polypeptide
MALPVTALLLPLALLLHAARPQVQLVQSGAEVKKPGASVKVSCKASGYIFTGYYIHWVRQAPGQGLEWMGWINPNSGGTNYAQKFQGRVTMTRDTSISTAYMELSGLRSDDPAVYYCARDMNILATVPFDIWGQGTLVTVSSGGGGSGGGGSGGGGSDIQLTQSPSSLSASVGDRVTITCRASQSISSYLNWYQQKPGKAPKLLIYAASSLQSGVPSRFSGSGSGTDFTLTVNSLQPEDFATYYCQQGDSVPLTFGGGTKVEIKTTTPAPRPPTPAPTIASQPLSLRPEACRPAAGGAVHTRGLDFACDIYIWAPLAGTCGVLLLSLVITLYCKRGRKKLLYIFKQPFMRPVQTTQEEDGCSCRFPEEEEGGCELRVKFSRSADAPAYKQGQNQLYNELNLGRREEYDVLDKRRGRDPEMGGKPRRKNPQEGLYNELQKDKMAEAYSEIGMKGERRRGKGHDGLYQGLSTATKDTYDALHMQALPPR

SEQ ID NO: 157 - protein, 336 aa, Artificial Sequence
  Description of Artificial Sequence: Synthetic polypeptide
MALPVTALLLPLALLLHAARPQVQLQQSGAEVKKSGASVKVSCKASGYTFTDYYMHWLRQAPGQGLEWMGWINPNSGDTNYAQKFQGRVTLTRDTSISTVYMELSRLRSDDTAVYYCARDMNILATVPFDIWGQGTMVTVSSASGGGGSGGRASGGGGSDIQMTQSPSSLSASVGDRVTITCRASQSISSYLNWYQQKPGKAPKLLIYAASSLQSGVPSRFSGSGSGTDFTLTISSLQPEDFATYYCQQGDSVPLTFGGGTKVEIKTTTPAPRPPTPAPTIASQPLSLRPEACRPAAGGAVHTRGLDFACDIYIWAPLAGTCGVLLLSLVITLYCK

SEQ ID NO: 158 - protein, 487 aa, Artificial Sequence
  Description of Artificial Sequence: Synthetic polypeptide
MALPVTALLLPLALLLHAARPQVQLVQSGAEVKKPGASVKVSCKASGYTFTGYYMHWVRQAPGQGLEWMGWINPNSGGTNYAQKFQGRVTMTRDTSISTAYMELSRLRSDDTAVYYCARDMNILATVPFDIWGQGTMVTVSSGGGGSGGGGSGGGGSDIQMTQSPSSLSASVGDRVTITCRASQSISTYLNWYQQKPGKAPNLLIYAAFSLQSGVPSRFSGSGSGTDFTLTINSLQPEDFATYYCQQGDSVPLTFGGGTKLEIKTTTPAPRPPTPAPTIASQPLSLRPEACRPAAGGAVHTRGLDFACDIYIWAPLAGTCGVLLLSLVITLYCKRGRKKLLYIFKQPFMRPVQTTQEEDGCSCRFPEEEEGGCELRVKFSRSADAPAYKQGQNQLYNELNLGRREEYDVLDKRRGRDPEMGGKPRRKNPQEGLYNELQKDKMAEAYSEIGMKGERRRGKGHDGLYQGLSTATKDTYDALHMQALPPR

SEQ ID NO: 159 - skipped

SEQ ID NO: 160 - protein, 242 aa, Artificial Sequence
  Description of Artificial Sequence: Synthetic polypeptide
DIQMTQTTSSLSASLGDRVTISCRASQDISKYLNWYQQKPDGTVKLLIYHTSRLHSGVPSRFSGSGSGTDYSLTISNLEQEDIATYFCQQGNTLPYTFGGGTKLEITGGGGSGGGGSGGGGSEVKLQESGPGLVAPSQSLSVTCTVSGVSLPDYGVSWIRQPPRKGLEWLGVIWGSETTYYNSALKSRLTIIKDNSKSQVFLKMNSLQTDDTAIYYCAKHYYYGGSYAMDYWGQGTSVTVSS

SEQ ID NO: 161 - protein, 242 aa, Artificial Sequence
  Description of Artificial Sequence: Synthetic polypeptide
EIVMTQSPATLSLSPGERATLSCRASQDISKYLNWYQQKPGQAPRLLIYHTSRLHSGIPARFSGSGSGTDYTLTISSLQPEDFAVYFCQQGNTLPYTFGQGTKLEIKGGGGSGGGGSGGGGSQVQLQESGPGLVKPSETLSLTCTVSGVSLPDYGVSWIRQPPGKGLEWIGVIWGSETTYYSSSLKSRVTISKDNSKNQVSLKLSSVTAADTAVYYCAKHYYYGGSYAMDYWGQGTLVTVSS

SEQ ID NO: 162 - protein, 242 aa, Artificial Sequence
  Description of Artificial Sequence: Synthetic polypeptide
EIVMTQSPATLSLSPGERATLSCRASQDISKYLNWYQQKPGQAPRLLIYHTSRLHSGIPARFSGSGSGTDYTLTISSLQPEDFAVYFCQQGNTLPYTFGQGTKLEIKGGGGSGGGGSGGGGSQVQLQESGPGLVKPSETLSLTCTVSGVSLPDYGVSWIRQPPGKGLEWIGVIWGSETTYYQSSLKSRVTISKDNSKNQVSLKLSSVTAADTAVYYCAKHYYYGGSYAMDYWGQGTLVTVSS

SEQ ID NO: 163 - protein, 242 aa, Artificial Sequence
  Description of Artificial Sequence: Synthetic polypeptide
QVQLQESGPGLVKPSETLSLTCTVSGVSLPDYGVSWIRQPPGKGLEWIGVIWGSETTYYSSSLKSRVTISKDNSKNQVSLKLSSVTAADTAVYYCAKHYYYGGSYAMDYWGQGTLVTVSSGGGGSGGGGSGGGGSEIVMTQSPATLSLSPGERATLSCRASQDISKYLNWYQQKPGQAPRLLIYHTSRLHSGIPARFSGSGSGTDYTLTISSLQPEDFAVYFCQQGNTLPYTFGQGTKLEIK

SEQ ID NO: 164 - protein, 242 aa, Artificial Sequence
  Description of Artificial Sequence: Synthetic polypeptide
QVQLQESGPGLVKPSETLSLTCTVSGVSLPDYGVSWIRQPPGKGLEWIGVIWGSETTYYQSSLKSRVTISKDNSKNQVSLKLSSVTAADTAVYYCAKHYYYGGSYAMDYWGQGTLVTVSSGGGGSGGGGSGGGGSEIVMTQSPATLSLSPGERATLSCRASQDISKYLNWYQQKPGQAPRLLIYHTSRLHSGIPARFSGSGSGTDYTLTISSLQPEDFAVYFCQQGNTLPYTFGQGTKLEIK

SEQ ID NO: 165 - protein, 247 aa, Artificial Sequence
  Description of Artificial Sequence: Synthetic polypeptide
EIVMTQSPATLSLSPGERATLSCRASQDISKYLNWYQQKPGQAPRLLIYHTSRLHSGIPARFSGSGSGTDYTLTISSLQPEDFAVYFCQQGNTLPYTFGQGTKLEIKGGGGSGGGGSGGGGSGGGGSQVQLQESGPGLVKPSETLSLTCTVSGVSLPDYGVSWIRQPPGKGLEWIGVIWGSETTYYSSSLKSRVTISKDNSKNQVSLKLSSVTAADTAVYYCAKHYYYGGSYAMDYWGQGTLVTVSS

SEQ ID NO: 166 - protein, 247 aa, Artificial Sequence
  Description of Artificial Sequence: Synthetic polypeptide
EIVMTQSPATLSLSPGERATLSCRASQDISKYLNWYQQKPGQAPRLLIYHTSRLHSGIPARFSGSGSGTDYTLTISSLQPEDFAVYFCQQGNTLPYTFGQGTKLEIKGGGGSGGGGSGGGGSGGGGSQVQLQESGPGLVKPSETLSLTCTVSGVSLPDYGVSWIRQPPGKGLEWIGVIWGSETTYYQSSLKSRVTISKDNSKNQVSLKLSSVTAADTAVYYCAKHYYYGGSYAMDYWGQGTLVTVSS

SEQ ID NO: 167 - protein, 247 aa, Artificial Sequence
  Description of Artificial Sequence: Synthetic polypeptide
QVQLQESGPGLVKPSETLSLTCTVSGVSLPDYGVSWIRQPPGKGLEWIGVIWGSETTYYSSSLKSRVTISKDNSKNQVSLKLSSVTAADTAVYYCAKHYYYGGSYAMDYWGQGTLVTVSSGGGGSGGGGSGGGGSGGGGSEIVMTQSPATLSLSPGERATLSCRASQDISKYLNWYQQKPGQAPRLLIYHTSRLHSGIPARFSGSGSGTDYTLTISSLQPEDFAVYFCQQGNTLPYTFGQGTKLEIK

SEQ ID NO: 168 - protein, 247 aa, Artificial Sequence
  Description of Artificial Sequence: Synthetic polypeptide
QVQLQESGPGLVKPSETLSLTCTVSGVSLPDYGVSWIRQPPGKGLEWIGVIWGSETTYYQSSLKSRVTISKDNSKNQVSLKLSSVTAADTAVYYCAKHYYYGGSYAMDYWGQGTLVTVSSGGGGSGGGGSGGGGSGGGGSEIVMTQSPATLSLSPGERATLSCRASQDISKYLNWYQQKPGQAPRLLIYHTSRLHSGIPARFSGSGSGTDYTLTISSLQPEDFAVYFCQQGNTLPYTFGQGTKLEIK

SEQ ID NO: 169 - protein, 247 aa, Artificial Sequence
  Description of Artificial Sequence: Synthetic polypeptide
EIVMTQSPATLSLSPGERATLSCRASQDISKYLNWYQQKPGQAPRLLIYHTSRLHSGIPARFSGSGSGTDYTLTISSLQPEDFAVYFCQQGNTLPYTFGQGTKLEIKGGGGSGGGGSGGGGSGGGGSQVQLQESGPGLVKPSETLSLTCTVSGVSLPDYGVSWIRQPPGKGLEWIGVIWGSETTYYNSSLKSRVTISKDNSKNQVSLKLSSVTAADTAVYYCAKHYYYGGSYAMDYWGQGTLVTVSS

SEQ ID NO: 170 - protein, 247 aa, Artificial Sequence
  Description of Artificial Sequence: Synthetic polypeptide
QVQLQESGPGLVKPSETLSLTCTVSGVSLPDYGVSWIRQPPGKGLEWIGVIWGSETTYYNSSLKSRVTISKDNSKNQVSLKLSSVTAADTAVYYCAKHYYYGGSYAMDYWGQGTLVTVSSGGGGSGGGGSGGGGSGGGGSEIVMTQSPATLSLSPGERATLSCRASQDISKYLNWYQQKPGQAPRLLIYHTSRLHSGIPARFSGSGSGTDYTLTISSLQPEDFAVYFCQQGNTLPYTFGQGTKLEIK

SEQ ID NO: 171 - protein, 242 aa, Artificial Sequence
  Description of Artificial Sequence: Synthetic polypeptide
EIVMTQSPATLSLSPGERATLSCRASQDISKYLNWYQQKPGQAPRLLIYHTSRLHSGIPARFSGSGSGTDYTLTISSLQPEDFAVYFCQQGNTLPYTFGQGTKLEIKGGGGSGGGGSGGGGSQVQLQESGPGLVKPSETLSLTCTVSGVSLPDYGVSWIRQPPGKGLEWIGVIWGSETTYYNSSLKSRVTISKDNSKNQVSLKLSSVTAADTAVYYCAKHYYYGGSYAMDYWGQGTLVTVSS

SEQ ID NO: 172 - protein, 242 aa, Artificial Sequence
  Description of Artificial Sequence: Synthetic polypeptide
QVQLQESGPGLVKPSETLSLTCTVSGVSLPDYGVSWIRQPPGKGLEWIGVIWGSETTYYNSSLKSRVTISKDNSKNQVSLKLSSVTAADTAVYYCAKHYYYGGSYAMDYWGQGTLVTVSSGGGGSGGGGSGGGGSEIVMTQSPATLSLSPGERATLSCRASQDISKYLNWYQQKPGQAPRLLIYHTSRLHSGIPARFSGSGSGTDYTLTISSLQPEDFAVYFCQQGNTLPYTFGQGTKLEIK

SEQ ID NO: 173 - protein, 119 aa, Artificial Sequence
  Description of Artificial Sequence: Synthetic polypeptide
QVQLLESGAELVRPGSSVKISCKASGYAFSSYWMNWVKQRPGQGLEWIGQIYPGDGDTNYNGKFKGQATLTADKSSSTAYMQLSGLTSEDSAVYSCARKTISSVVDFYFDYWGQGTTVT

SEQ ID NO: 174 - protein, 111 aa, Artificial Sequence
  Description of Artificial Sequence: Synthetic polypeptide
ELVLTQSPKFMSTSVGDRVSVTCKASQNVGTNVAWYQQKPGQSPKPLIYSATYRNSGVPDRFTGSGSGTDFTLTITNVQSKDLADYFYFCQYNRYPYTSGGGTKLEIKRRS

SEQ ID NO: 175 - protein, 248 aa, Artificial Sequence
  Description of Artificial Sequence: Synthetic polypeptide
QVQLLESGAELVRPGSSVKISCKASGYAFSSYWMNWVKQRPGQGLEWIGQIYPGDGDTNYNGKFKGQATLTADKSSSTAYMQLSGLTSEDSAVYSCARKTISSVVDFYFDYWGQGTTVTGSTSGSGKPGSGEGSTKGELVLTQSPKFMSTSVGDRVSVTCKASQNVGTNVAWYQQKPGQSPKPLIYSATYRNSGVPDRFTGSGSGTDFTLTITNVQSKDLADYFYFCQYNRYPYTSGGGTKLEIKRRS

SEQ ID NO: 176 - protein, 10 aa, Artificial Sequence
  Description of Artificial Sequence: Synthetic peptide
GVSLPDYGVS

SEQ ID NO: 177 - protein, 16 aa, Artificial Sequence
  Description of Artificial Sequence: Synthetic peptide
VIWGSETTYYNSALKS

SEQ ID NO: 178 - protein, 16 aa, Artificial Sequence
  Description of Artificial Sequence: Synthetic peptide
VIWGSETTYYSSSLKS

SEQ ID NO: 179 - protein, 16 aa, Artificial Sequence
  Description of Artificial Sequence: Synthetic peptide
VIWGSETTYYQSSLKS

SEQ ID NO: 180 - protein, 16 aa, Artificial Sequence
  Description of Artificial Sequence: Synthetic peptide
VIWGSETTYYNSSLKS

SEQ ID NO: 181 - protein, 12 aa, Artificial Sequence
  Description of Artificial Sequence: Synthetic peptide
HYYYGGSYAMDY

SEQ ID NO: 182 - protein, 11 aa, Artificial Sequence
  Description of Artificial Sequence: Synthetic peptide
RASQDISKYLN

SEQ ID NO: 183 - protein, 7 aa, Artificial Sequence
  Description of Artificial Sequence: Synthetic peptide
HTSRLHS

SEQ ID NO: 184 - protein, 9 aa, Artificial Sequence
  Description of Artificial Sequence: Synthetic peptide
QQGNTLPYT

SEQ ID NO: 185 - protein, 486 aa, Artificial Sequence
  Description of Artificial Sequence: Synthetic polypeptide
MALPVTALLLPLALLLHAARPDIQMTQTTSSLSASLGDRVTISCRASQDISKYLNWYQQKPDGTVKLLIYHTSRLHSGVPSRFSGSGSGTDYSLTISNLEQEDIATYFCQQGNTLPYTFGGGTKLEITGGGGSGGGGSGGGGSEVKLQESGPGLVAPSQSLSVTCTVSGVSLPDYGVSWIRQPPRKGLEWLGVIWGSETTYYNSALKSRLTIIKDNSKSQVFLKMNSLQTDDTAIYYCAKHYYYGGSYAMDYWGQGTSVTVSSTTTPAPRPPTPAPTIASQPLSLRPEACRPAAGGAVHTRGLDFACDIYIWAPLAGTCGVLLLSLVITLYCKRGRKKLLYIFKQPFMRPVQTTQEEDGCSCRFPEEEEGGCELRVKFSRSADAPAYKQGQNQLYNELNLGRREEYDVLDKRRGRDPEMGGKPRRKNPQEGLYNELQKDKMAEAYSEIGMKGERRRGKGHDGLYQGLSTATKDTYDALHMQALPPR

SEQ ID NO: 186 - protein, 486 aa, Artificial Sequence
  Description of Artificial Sequence: Synthetic polypeptide
MALPVTALLLPLALLLHAARPEIVMTQSPATLSLSPGERATLSCRASQDISKYLNWYQQKPGQAPRLLIYHTSRLHSGIPARFSGSGSGTDYTLTISSLQPEDFAVYFCQQGNTLPYTFGQGTKLEIKGGGGSGGGGSGGGGSQVQLQESGPGLVKPSETLSLTCTVSGVSLPDYGVSWIRQPPGKGLEWIGVIWGSETTYYSSSLKSRVTISKDNSKNQVSLKLSSVTAADTAVYYCAKHYYYGGSYAMDYWGQGTLVTVSSTTTPAPRPPTPAPTIASQPLSLRPEACRPAAGGAVHTRGLDFACDIYIWAPLAGTCGVLLLSLVITLYCKRGRKKLLYIFKQPFMRPVQTTQEEDGCSCRFPEEEEGGCELRVKFSRSADAPAYKQGQNQLYNELNLGRREEYDVLDKRRGRDPEMGGKPRRKNPQEGLYNELQKDKMAEAYSEIGMKGERRRGKGHDGLYQGLSTATKDTYDALHMQALPPR

SEQ ID NO: 187 - protein, 486 aa, Artificial Sequence
  Description of Artificial Sequence: Synthetic polypeptide
MALPVTALLLPLALLLHAARPEIVMTQSPATLSLSPGERATLSCRASQDISKYLNWYQQKPGQAPRLLIYHTSRLHSGIPARFSGSGSGTDYTLTISSLQPEDFAVYFCQQGNTLPYTFGQGTKLEIKGGGGSGGGGSGGGGSQVQLQESGPGLVKPSETLSLTCTVSGVSLPDYGVSWIRQPPGKGLEWIGVIWGSETTYYQSSLKSRVTISKDNSKNQVSLKLSSVTAADTAVYYCAKHYYYGGSYAMDYWGQGTLVTVSSTTTPAPRPPTPAPTIASQPLSLRPEACRPAAGGAVHTRGLDFACDIYIWAPLAGTCGVLLLSLVITLYCKRGRKKLLYIFKQPFMRPVQTTQEEDGCSCRFPEEEEGGCELRVKFSRSADAPAYKQGQNQLYNELNLGRREEYDVLDKRRGRDPEMGGKPRRKNPQEGLYNELQKDKMAEAYSEIGMKGERRRGKGHDGLYQGLSTATKDTYDALHMQALPPR

SEQ ID NO: 188 - protein, 486 aa, Artificial Sequence
  Description of Artificial Sequence: Synthetic polypeptide
MALPVTALLLPLALLLHAARPQVQLQESGPGLVKPSETLSLTCTVSGVSLPDYGVSWIRQPPGKGLEWIGVIWGSETTYYSSSLKSRVTISKDNSKNQVSLKLSSVTAADTAVYYCAKHYYYGGSYAMDYWGQGTLVTVSSGGGGSGGGGSGGGGSEIVMTQSPATLSLSPGERATLSCRASQDISKYLNWYQQKPGQAPRLLIYHTSRLHSGIPARFSGSGSGTDYTLTISSLQPEDFAVYFCQQGNTLPYTFGQGTKLEIKTTTPAPRPPTPAPTIASQPLSLRPEACRPAAGGAVHTRGLDFACDIYIWAPLAGTCGVLLLSLVITLYCKRGRKKLLYIFKQPFMRPVQTTQEEDGCSCRFPEEEEGGCELRVKFSRSADAPAYKQGQNQLYNELNLGRREEYDVLDKRRGRDPEMGGKPRRKNPQEGLYNELQKDKMAEAYSEIGMKGERRRGKGHDGLYQGLSTATKDTYDALHMQALPPR

SEQ ID NO: 189 - protein, 486 aa, Artificial Sequence
  Description of Artificial Sequence: Synthetic polypeptide
MALPVTALLLPLALLLHAARPQVQLQESGPGLVKPSETLSLTCTVSGVSLPDYGVSWIRQPPGKGLEWIGVIWGSETTYYQSSLKSRVTISKDNSKNQVSLKLSSVTAADTAVYYCAKHYYYGGSYAMDYWGQGTLVTVSSGGGGSGGGGSGGGGSEIVMTQSPATLSLSPGERATLSCRASQDISKYLNWYQQKPGQAPRLLIYHTSRLHSGIPARFSGSGSGTDYTLTISSLQPEDFAVYFCQQGNTLPYTFGQGTKLEIKTTTPAPRPPTPAPTIASQPLSLRPEACRPAAGGAVHTRGLDFACDIYIWAPLAGTCGVLLLSLVITLYCKRGRKKLLYIFKQPFMRPVQTTQEEDGCSCRFPEEEEGGCELRVKFSRSADAPAYKQGQNQLYNELNLGRREEYDVLDKRRGRDPEMGGKPRRKNPQEGLYNELQKDKMAEAYSEIGMKGERRRGKGHDGLYQGLSTATKDTYDALHMQALPPR

SEQ ID NO: 190 - protein, 491 aa, Artificial Sequence
  Description of Artificial Sequence: Synthetic polypeptide
MALPVTALLLPLALLLHAARPEIVMTQSPATLSLSPGERATLSCRASQDISKYLNWYQQKPGQAPRLLIYHTSRLHSGIPARFSGSGSGTDYTLTISSLQPEDFAVYFCQQGNTLPYTFGQGTKLEIKGGGGSGGGGSGGGGSGGGGSQVQLQESGPGLVKPSETLSLTCTVSGVSLPDYGVSWIRQPPGKGLEWIGVIWGSETTYYSSSLKSRVTISKDNSKNQVSLKLSSVTAADTAVYYCAKHYYYGGSYAMDYWGQGTLVTVSSTTTPAPRPPTPAPTIASQPLSLRPEACRPAAGGAVHTRGLDFACDIYIWAPLAGTCGVLLLSLVITLYCKRGRKKLLYIFKQPFMRPVQTTQEEDGCSCRFPEEEEGGCELRVKFSRSADAPAYKQGQNQLYNELNLGRREEYDVLDKRRGRDPEMGGKPRRKNPQEGLYNELQKDKMAEAYSEIGMKGERRRGKGHDGLYQGLSTATKDTYDALHMQALPPR

SEQ ID NO: 191 - protein, 491 aa, Artificial Sequence
  Description of Artificial Sequence: Synthetic polypeptide
MALPVTALLLPLALLLHAARPEIVMTQSPATLSLSPGERATLSCRASQDISKYLNWYQQKPGQAPRLLIYHTSRLHSGIPARFSGSGSGTDYTLTISSLQPEDFAVYFCQQGNTLPYTFGQGTKLEIKGGGGSGGGGSGGGGSGGGGSQVQLQESGPGLVKPSETLSLTCTVSGVSLPDYGVSWIRQPPGKGLEWIGVIWGSETTYYQSSLKSRVTISKDNSKNQVSLKLSSVTAADTAVYYCAKHYYYGGSYAMDYWGQGTLVTVSSTTTPAPRPPTPAPTIASQPLSLRPEACRPAAGGAVHTRGLDFACDIYIWAPLAGTCGVLLLSLVITLYCKRGRKKLLYIFKQPFMRPVQTTQEEDGCSCRFPEEEEGGCELRVKFSRSADAPAYKQGQNQLYNELNLGRREEYDVLDKRRGRDPEMGGKPRRKNPQEGLYNELQKDKMAEAYSEIGMKGERRRGKGHDGLYQGLSTATKDTYDALHMQALPPR

SEQ ID NO: 192 - protein, 491 aa, Artificial Sequence
  Description of Artificial Sequence: Synthetic polypeptide
MALPVTALLLPLALLLHAARPQVQLQESGPGLVKPSETLSLTCTVSGVSLPDYGVSWIRQPPGKGLEWIGVIWGSETTYYSSSLKSRVTISKDNSKNQVSLKLSSVTAADTAVYYCAKHYYYGGSYAMDYWGQGTLVTVSSGGGGSGGGGSGGGGSGGGGSEIVMTQSPATLSLSPGERATLSCRASQDISKYLNWYQQKPGQAPRLLIYHTSRLHSGIPARFSGSGSGTDYTLTISSLQPEDFAVYFCQQGNTLPYTFGQGTKLEIKTTTPAPRPPTPAPTIASQPLSLRPEACRPAAGGAVHTRGLDFACDIYIWAPLAGTCGVLLLSLVITLYCKRGRKKLLYIFKQPFMRPVQTTQEEDGCSCRFPEEEEGGCELRVKFSRSADAPAYKQGQNQLYNELNLGRREEYDVLDKRRGRDPEMGGKPRRKNPQEGLYNELQKDKMAEAYSEIGMKGERRRGKGHDGLYQGLSTATKDTYDALHMQALPPR

SEQ ID NO: 193 - protein, 491 aa, Artificial Sequence
  Description of Artificial Sequence: Synthetic polypeptide
MALPVTALLLPLALLLHAARPQVQLQESGPGLVKPSETLSLTCTVSGVSLPDYGVSWIRQPPGKGLEWIGVIWGSETTYYQSSLKSRVTISKDNSKNQVSLKLSSVTAADTAVYYCAKHYYYGGSYAMDYWGQGTLVTVSSGGGGSGGGGSGGGGSGGGGSEIVMTQSPATLSLSPGERATLSCRASQDISKYLNWYQQKPGQAPRLLIYHTSRLHSGIPARFSGSGSGTDYTLTISSLQPEDFAVYFCQQGNTLPYTFGQGTKLEIKTTTPAPRPPTPAPTIASQPLSLRPEACRPAAGGAVHTRGLDFACDIYIWAPLAGTCGVLLLSLVITLYCKRGRKKLLYIFKQPFMRPVQTTQEEDGCSCRFPEEEEGGCELRVKFSRSADAPAYKQGQNQLYNELNLGRREEYDVLDKRRGRDPEMGGKPRRKNPQEGLYNELQKDKMAEAYSEIGMKGERRRGKGHDGLYQGLSTATKDTYDALHMQALPPR

SEQ ID NO: 194 - protein, 491 aa, Artificial Sequence
  Description of Artificial Sequence: Synthetic polypeptide
MALPVTALLLPLALLLHAARPEIVMTQSPATLSLSPGERATLSCRASQDISKYLNWYQQKPGQAPRLLIYHTSRLHSGIPARFSGSGSGTDYTLTISSLQPEDFAVYFCQQGNTLPYTFGQGTKLEIKGGGGSGGGGSGGGGSGGGGSQVQLQESGPGLVKPSETLSLTCTVSGVSLPDYGVSWIRQPPGKGLEWIGVIWGSETTYYNSSLKSRVTISKDNSKNQVSLKLSSVTAADTAVYYCAKHYYYGGSYAMDYWGQGTLVTVSSTTTPAPRPPTPAPTIASQPLSLRPEACRPAAGGAVHTRGLDFACDIYIWAPLAGTCGVLLLSLVITLYCKRGRKKLLYIFKQPFMRPVQTTQEEDGCSCRFPEEEEGGCELRVKFSRSADAPAYKQGQNQLYNELNLGRREEYDVLDKRRGRDPEMGGKPRRKNPQEGLYNELQKDKMAEAYSEIGMKGERRRGKGHDGLYQGLSTATKDTYDALHMQALPPR

SEQ ID NO: 195 - protein, 491 aa, Artificial Sequence; identical to SEQ ID NO: 194
  Description of Artificial Sequence: Synthetic polypeptide

SEQ ID NO: 196 - protein, 491 aa, Artificial Sequence
  Description of Artificial Sequence: Synthetic polypeptide
MALPVTALLLPLALLLHAARPQVQLQESGPGLVKPSETLSLTCTVSGVSLPDYGVSWIRQPPGKGLEWIGVIWGSETTYYNSSLKSRVTISKDNSKNQVSLKLSSVTAADTAVYYCAKHYYYGGSYAMDYWGQGTLVTVSSGGGGSGGGGSGGGGSGGGGSEIVMTQSPATLSLSPGERATLSCRASQDISKYLNWYQQKPGQAPRLLIYHTSRLHSGIPARFSGSGSGTDYTLTISSLQPEDFAVYFCQQGNTLPYTFGQGTKLEIKTTTPAPRPPTPAPTIASQPLSLRPEACRPAAGGAVHTRGLDFACDIYIWAPLAGTCGVLLLSLVITLYCKRGRKKLLYIFKQPFMRPVQTTQEEDGCSCRFPEEEEGGCELRVKFSRSADAPAYKQGQNQLYNELNLGRREEYDVLDKRRGRDPEMGGKPRRKNPQEGLYNELQKDKMAEAYSEIGMKGERRRGKGHDGLYQGLSTATKDTYDALHMQALPPR

SEQ ID NO: 197 - protein, 486 aa, Artificial Sequence
  Description of Artificial Sequence: Synthetic polypeptide
MALPVTALLLPLALLLHAARPEIVMTQSPATLSLSPGERATLSCRASQDISKYLNWYQQKPGQAPRLLIYHTSRLHSGIPARFSGSGSGTDYTLTISSLQPEDFAVYFCQQGNTLPYTFGQGTKLEIKGGGGSGGGGSGGGGSQVQLQESGPGLVKPSETLSLTCTVSGVSLPDYGVSWIRQPPGKGLEWIGVIWGSETTYYNSSLKSRVTISKDNSKNQVSLKLSSVTAADTAVYYCAKHYYYGGSYAMDYWGQGTLVTVSSTTTPAPRPPTPAPTIASQPLSLRPEACRPAAGGAVHTRGLDFACDIYIWAPLAGTCGVLLLSLVITLYCKRGRKKLLYIFKQPFMRPVQTTQEEDGCSCRFPEEEEGGCELRVKFSRSADAPAYKQGQNQLYNELNLGRREEYDVLDKRRGRDPEMGGKPRRKNPQEGLYNELQKDKMAEAYSEIGMKGERRRGKGHDGLYQGLSTATKDTYDALHMQALPPR

SEQ ID NO: 198-238 - skipped (41 entries)

SEQ ID NO: 239 - protein, 246 aa, Artificial Sequence
  Description of Artificial Sequence: Synthetic polypeptide
QVQLVESGGGLVQPGRSLRLSCAASGFTFSNYAMSWVRQAPGKGLGWVSGISRSGENTYYADSVKGRFTISRDNSKNTLYLQMNSLRDEDTAVYYCARSPAHYYGGMDVWGQGTTVTVSSASGGGGSGGRASGGGGSDIVLTQSPGTLSLSPGERATLSCRASQSISSSFLAWYQQKPGQAPRLLIYGASRRATGIPDRFSGSGSGTDFTLTISRLEPEDSAVYYCQQYHSSPSWTFGQGTKLEIK

SEQ ID NO: 240 - protein, 244 aa, Artificial Sequence
  Description of Artificial Sequence: Synthetic polypeptide
QVQLVESGGGLVQPGRSLRLSCAASGFTFDDYAMHWVRQAPGKGLEWVSGISWNSGSIGYADSVKGRFTISRDNAKNSLYLQMNSLRAEDTALYYCSVHSFLAYWGQGTLVTVSSASGGGGSGGRASGGGGSDIVMTQTPLSLPVTPGEPASISCRSSQSLLHSNGYNYLDWYLQKPGQSPQLLIYLGSNRASGVPDRFSGSGSGTDFTLKISRVEAEDVGVYYCMQALQTPYTFGQGTKVEIK

SEQ ID NO: 241 - protein, 243 aa, Artificial Sequence
  Description of Artificial Sequence: Synthetic polypeptide
EVQLLESGGGLVQPGGSLRLSCAVSGFALSNHGMSWVRRAPGKGLEWVSGIVYSGSTYYAASVKGRFTISRDNSRNTLYLQMNSLRPEDTAIYYCSAHGGESDVWGQGTTVTVSSASGGGGSGGRASGGGGSDIVMTQTPLSLSVTPGQPASISCKSSQSLLRNDGKTPLYWYLQKAGQPPQLLIYEVSNRFSGVPDRFSGSGSGTDFTLKISRVEAEDVGAYYCMQNIQFPSFGGGTKLEIK

SEQ ID NO: 242 - protein, 249 aa, Artificial Sequence
  Description of Artificial Sequence: Synthetic polypeptide
QVQLVQSGAEVRKTGASVKVSCKASGYIFDNFGINWVRQAPGQGLEWMGWINPKNNNTNYAQKFQGRVTITADESTNTAYMEVSSLRSEDTAVYYCARGPYYYQSYMDVWGQGTMVTVSSASGGGGSGGRASGGGGSDIVMTQTPLSLPVTPGEPASISCRSSQSLLHSNGYNYLNWYLQKPGQSPQLLIYLGSKRASGVPDRFSGSGSGTDFTLHITRVGAEDVGVYYCMQALQTPYTFGQGTKLEIK

SEQ ID NO: 243 - protein, 246 aa, Artificial Sequence
  Description of Artificial Sequence: Synthetic polypeptide
QVQLQESGGGLVQPGGSLRLSCAASGFTFSSDAMTWVRQAPGKGLEWVSVISGSGGTTYYADSVKGRFTISRDNSKNTLYLQMNSLRAEDTAVYYCAKLDSSGYYYARGPRYWGQGTLVTVSSASGGGGSGGRASGGGGSDIQLTQSPSSLSASVGDRVTITCRASQSISSYLNWYQQKPGKAPKLLIYGASTLASGVPARFSGSGSGTHFTLTINSLQSEDSATYYCQQSYKRASFGQGTKVEIK

SEQ ID NO: 244 - protein, 247 aa, Artificial Sequence
  Description of Artificial Sequence: Synthetic polypeptide
QVQLVQSGAEVKKPGASVKVSCKASGYTFSNYGITWVRQAPGQGLEWMGWISAYNGNTNYAQKFQGRVTMTRNTSISTAYMELSSLRSEDTAVYYCARGPYYYYMDVWGKGTMVTVSSASGGGGSGGRASGGGGSEIVMTQSPLSLPVTPGEPASISCRSSQSLLYSNGYNYVDWYLQKPGQSPQLLIYLGSNRASGVPDRFSGSGSGTDFKLQISRVEAEDVGIYYCMQGRQFPYSFGQGTKVEIK

SEQ ID NO: 245 - protein, 238 aa, Artificial Sequence
  Description of Artificial Sequence: Synthetic polypeptide
EVQLLETGGGLVQPGGSLRLSCAVSGFALSNHGMSWVRRAPGKGLEWVSGIVYSGSTYYAASVKGRFTISRDNSRNTLYLQMNSLRPEDTAIYYCSAHGGESDVWGQGTTVTVSSASGGGGSGGRASGGGGSEIVLTQSPATLSVSPGESATLSCRASQSVSSNLAWYQQKPGQAPRLLIYGASTRASGIPDRFSGSGSGTDFTLTISSLQAEDVAVYYCQQYGSSLTFGGGTKVEIK

SEQ ID NO: 246 - protein, 239 aa, Artificial Sequence
  Description of Artificial Sequence: Synthetic polypeptide
EVQLVETGGGLVQPGGSLRLSCAVSGFALSNHGMSWVRRAPGKGLEWVSGIVYSGSTYYAASVKGRFTISRDNSRNTLYLQMNSLRPEDTAIYYCSAHGGESDVWGQGTTVTVSSASGGGGSGGRASGGGGSEIVMTQSPATLSVSPGERATLSCRASQSVSSKLAWYQQKPGQAPRLLMYGASIRATGIPDRFSGSGSGTEFTLTISSLEPEDFAVYYCQQYGSSSWTFGQGTKVEIK

SEQ ID NO: 247 - protein, 241 aa, Artificial Sequence
  Description of Artificial Sequence: Synthetic polypeptide
EVQLVETGGGVVQPGGSLRLSCAVSGFALSNHGMSWVRRAPGKGLEWVSGIVYSGSTYYAASVKGRFTISRDNSRNTLYLQMNSLRPEDTAIYYCSAHGGESDVWGQGTTVTVSSASGGGGSGGRASGGGGSEIVLTQSPGTLSLSPGERATLSCRASQSVGSTNLAWYQQKPGQAPRLLIYDASNRATGIPDRFSGGGSGTDFTLTISRLEPEDFAVYYCQQYGSSPPWTFGQGTKVEIK

SEQ ID NO: 248 - protein, 239 aa, Artificial Sequence
  Description of Artificial Sequence: Synthetic polypeptide
QVQLVESGGGLVKPGGSLRLSCAASGFTFSDYYMSWIRQAPGKGLEWVSYISSSGSTIYYADSVKGRFTISRDNAKNSLYLQMNSLRAEDTAVYYCARESGDGMDVWGQGTTVTVSSASGGGGSGGRASGGGGSDIQMTQSPSSLSASVGDRVTITCRASQSISSYLNWYQQKPGKAPKLLIYAASSLQSGVPSRFSGSGSGTDFTLTISSLQPEDFATYYCQQSYTLAFGQGTKVDIK

SEQ ID NO: 249 - protein, 239 aa, Artificial Sequence
  Description of Artificial Sequence: Synthetic polypeptide
EVQLVESGGGLVQPGGSLRLSCAVSGFALSNHGMSWVRRAPGKGLEWVSGIVYSGSTYYAASVKGRFTISRDNSRNTLYLQMNSLRPEDTAIYYCSAHGGESDVWGQGTTVTVSSASGGGGSGGRASGGGGSDIQLTQSPSSLSASVGDRVTITCRASQSISSYLNWYQQKPGKAPKLLIYAASSLQSGVPSRFSGSGSGTDFTLTISSLQPEDFATYYCQQSYSTPYTFGQGTKVEIK

SEQ ID NO: 250 - protein, 246 aa, Artificial Sequence
  Description of Artificial Sequence: Synthetic polypeptide
QVQLVQSGGGLVKPGGSLRLSCAASGFTFSDYYMSWIRQAPGKGLEWVSYISSSGNTIYYADSVKGRFTISRDNAKNSLYLQMNSLRAEDTAVYYCARSTMVREDYWGQGTLVTVSSASGGGGSGGRASGGGGSDIVLTQSPLSLPVTLGQPASISCKSSESLVHNSGKTYLNWFHQRPGQSPRRLIYEVSNRDSGVPDRFTGSGSGTDFTLKISRVEAEDVGVYYCMQGTHWPGTFGQGTKLEIK

SEQ ID NO: 251 - protein, 239 aa, Artificial Sequence
  Description of Artificial Sequence: Synthetic polypeptide
QVQLVESGGGLVQPGGSLRLSCAVSGFALSNHGMSWVRRAPGKGLEWVSGIVYSGSTYYAASVKGRFTISRDNSRNTLYLQMNSLRPEDTAIYYCSAHGGESDVWGQGTTVTVSSASGGGGSGGRASGGGGSDIRLTQSPSPLSASVGDRVTITCQASEDINKFLNWYHQTPGKAPKLLIYDASTLQTGVPSRFSGSGSGTDFTLTINSLQPEDIGTYYCQQYESLPLTFGGGTKVEIK

SEQ ID NO: 252 - protein, 240 aa, Artificial Sequence
  Description of Artificial Sequence: Synthetic polypeptide
EVQLVETGGGLVQPGGSLRLSCAVSGFALSNHGMSWVRRAPGKGLEWVSGIVYSGSTYYAASVKGRFTISRDNSRNTLYLQMNSLRPEDTAIYYCSAHGGESDVWGQGTTVTVSSASGGGGSGGRASGGGGSETTLTQSPATLSVSPGERATLSCRASQSVGSNLAWYQQKPGQGPRLLIYGASTRATGIPARFSGSGSGTEFTLTISSLQPEDFAVYYCQQYNDWLPVTFGQGTKVEIK

SEQ ID NO: 253 - protein, 241 aa, Artificial Sequence
  Description of Artificial Sequence: Synthetic polypeptide
EVQLVESGGGLVQPGGSLRLSCAVSGFALSNHGMSWVRRAPGKGLEWVSGIVYSGSTYYAASVKGRFTISRDNSRNTLYLQMNSLRPEDTAIYYCSAHGGESDVWGQGTTVTVSSASGGGGSGGRASGGGGSEIVLTQSPGTLSLSPGERATLSCRASQSIGSSSLAWYQQKPGQAPRLLMYGASSRASGIPDRFSGSGSGTDFTLTISRLEPEDFAVYYCQQYAGSPPFTFGQGTKVEIK

SEQ ID NO: 254 - DNA, 738 bp, Artificial Sequence
  Description of Artificial Sequence: Synthetic polynucleotide
caagtgcaactcgtggaatctggtggaggactcgtgcaacccggaagatcgcttagactgtcgtgtgccgccagcgggttcactttctcgaactacgcgatgtcctgggtccgccaggcacccggaaagggactcggttgggtgtccggcatttcccggtccggcgaaaatacctactacgccgactccgtgaagggccgcttcaccatctcaagggacaacagcaaaaacaccctgtacttgcaaatgaactccctgcgggatgaagatacagccgtgtactattgcgcccggtcgcctgcccattactacggcggaatggacgtctggggacagggaaccactgtgactgtcagcagcgcgtcgggtggcggcggctcagggggtcgggcctccggggggggagggtccgacatcgtgctgacccagtccccgggaaccctgagcctgagcccgggagagcgcgcgaccctgtcatgccgggcatcccagagcattagctcctcctttctcgcctggtatcagcagaagcccggacaggccccgaggctgctgatctacggcgctagcagaagggctaccggaatcccagaccggttctccggctccggttccgggaccgatttcacccttactatctcgcgcctggaacctgaggactccgccgtctactactgccagcagtaccactcatccccgtcgtggacgttcggacagggcaccaagctggagattaag

SEQ ID NO: 255 - DNA, 732 bp, Artificial Sequence
  Description of Artificial Sequence: Synthetic polynucleotide
caagtgcaactcgtcgaatccggtggaggtctggtccaacctggtagaagcctgagactgtcgtgtgcggccagcggattcacctttgatgactatgctatgcactgggtgcggcaggccccaggaaagggcctggaatgggtgtcgggaattagctggaactccgggtccattggctacgccgactccgtgaagggccgcttcaccatctcccgcgacaacgcaaagaactccctgtacttgcaaatgaactcgctcagggctgaggataccgcgctgtactactgctccgtgcattccttcctggcctactggggacagggaactctggtcaccgtgtcgagcgcctccggcggcgggggctcgggtggacgggcctcgggcggaggggggtccgacatcgtgatgacccagaccccgctgagcttgcccgtgactcccggagagcctgcatccatctcctgccggtcatcccagtcccttctccactccaacggatacaactacctcgactggtacctccagaagccgggacagagccctcagcttctgatctacctggggtcaaatagagcctcaggagtgccggatcggttcagcggatctggttcgggaactgatttcactctgaagatttcccgcgtggaagccgaggacgtgggcgtctactactgtatgcaggcgctgcagaccccctataccttcggccaagggacgaaagtggagatcaag

SEQ ID NO: 256 - DNA, 729 bp, Artificial Sequence
  Description of Artificial Sequence: Synthetic polynucleotide
gaagtgcaattgttggaatctggaggaggacttgtgcagcctggaggatcactgagactttcgtgtgcggtgtcaggcttcgccctgagcaaccacggcatgagctgggtgcggagagccccggggaagggtctggaatgggtgtccgggatcgtctactccggttcaacttactacgccgcaagcgtgaagggtcgcttcaccatttcccgcgataactcccggaacaccctgtacctccaaatgaactccctgcggcccgaggacaccgccatctactactgttccgcgcatggaggagagtccgatgtctggggacagggcactaccgtgaccgtgtcgagcgcctcggggggaggaggctccggcggtcgcgcctccggggggggtggcagcgacattgtgatgacgcagactccactctcgctgtccgtgaccccgggacagcccgcgtccatctcgtgcaagagctcccagagcctgctgaggaacgacggaaagactcctctgtattggtacctccagaaggctggacagcccccgcaactgctcatctacgaagtgtcaaatcgcttctccggggtgccggatcggttttccggctcgggatcgggcaccgacttcaccctgaaaatctccagggtcgaggccgaggacgtgggagcctactactgcatgcaaaacatccagttcccttccttcggcggcggcacaaagctggagattaag

SEQ ID NO: 257 - DNA, 747 bp, Artificial Sequence
  Description of Artificial Sequence: Synthetic polynucleotide
caagtccaactcgtccagtccggcgcagaagtcagaaaaaccggtgctagcgtgaaagtgtcctgcaaggcctccggctacattttcgataacttcggaatcaactgggtcagacaggccccgggccaggggctggaatggatgggatggatcaaccccaagaacaacaacaccaactacgcacagaagttccagggccgcgtgactatcaccgccgatgaatcgaccaataccgcctacatggaggtgtcctccctgcggtcggaggacactgccgtgtattactgcgcgaggggcccatactactaccaaagctacatggacgtctggggacagggaaccatggtgaccgtgtcatccgcctccggtggtggaggctccggggggcgggcttcaggaggcggaggaagcgatattgtgatgacccagactccgcttagcctgcccgtgactcctggagaaccggcctccatttcctgccggtcctcgcaatcactcctgcattccaacggttacaactacctgaattggtacctccagaagcctggccagtcgccccagttgctgatctatctgggctcgaagcgcgcctccggggtgcctgaccggtttagcggatctgggagcggcacggacttcactctccacatcacccgcgtgggagcggaggacgtgggagtgtactactgtatgcaggcgctgcagactccgtacacattcggacagggcaccaagctggagatcaag

SEQ ID NO: 258 - DNA, 738 bp, Artificial Sequence
  Description of Artificial Sequence: Synthetic polynucleotide
caagtgcaacttcaagaatcaggcggaggactcgtgcagcccggaggatcattgcggctctcgtgcgccgcctcgggcttcaccttctcgagcgacgccatgacctgggtccgccaggccccggggaaggggctggaatgggtgtctgtgatttccggctccgggggaactacgtactacgccgattccgtgaaaggtcgcttcactatctcccgggacaacagcaagaacaccctttatctgcaaatgaattccctccgcgccgaggacaccgccgtgtactactgcgccaagctggactcctcgggctactactatgcccggggtccgagatactggggacagggaaccctcgtgaccgtgtcctccgcgtccggcggaggagggtcgggagggcgggcctccggcggcggcggttcggacatccagctgacccagtccccatcctcactgagcgcaagcgtgggcgacagagtcaccattacatgcagggcgtcccagagcatcagctcctacctgaactggtaccaacagaagcctggaaaggctcctaagctgttgatctacggggcttcgaccctggcatccggggtgcccgcgaggtttagcggaagcggtagcggcactcacttcactctgaccattaacagcctccagtccgaggattcagccacttactactgtcagcagtcctacaagcgggccagcttcggacagggcactaaggtcgagatcaag

SEQ ID NO: 259 - DNA, 741 bp, Artificial Sequence
  Description of Artificial Sequence: Synthetic polynucleotide
caagtccaactggtccagagcggtgcagaagtgaagaagcccggagcgagcgtgaaagtgtcctgcaaggcttccgggtacaccttctccaactacggcatcacttgggtgcgccaggccccgggacagggcctggaatggatggggtggatttccgcgtacaacggcaatacgaactacgctcagaagttccagggtagagtgaccatgactaggaacacctccatttccaccgcctacatggaactgtcctccctgcggagcgaggacaccgccgtgtactattgcgcccggggaccatactactactacatggatgtctgggggaaggggactatggtcaccgtgtcatccgcctcgggaggcggcggatcaggaggacgcgcctctggtggtggaggatcggagatcgtgatgacccagagccctctctccttgcccgtgactcctggggagcccgcatccatttcatgccggagctcccagtcacttctctactccaacggctataactacgtggattggtacctccaaaagccgggccagagcccgcagctgctgatctacctgggctcgaacagggccagcggagtgcctgaccggttctccgggtcgggaagcgggaccgacttcaagctgcaaatctcgagagtggaggccgaggacgtgggaatctactactgtatgcagggccgccagtttccgtactcgttcggacagggcaccaaagtggaaatcaag

SEQ ID NO: 260 - DNA, 714 bp, Artificial Sequence
  Description of Artificial Sequence: Synthetic polynucleotide
gaagtgcaattgctcgaaactggaggaggtctggtgcaacctggaggatcacttcgcctgtcctgcgccgtgtcgggctttgccctgtccaaccatggaatgagctgggtccgccgcgcgccggggaagggcctcgaatgggtgtccggcatcgtctactccggctccacctactacgccgcgtccgtgaagggccggttcacgatttcacgggacaactcgcggaacaccctgtacctccaaatgaattcccttcggccggaggatactgccatctactactgctccgcccacggtggcgaatccgacgtctggggccagggaaccaccgtgaccgtgtccagcgcgtccgggggaggaggaagcgggggtagagcatcgggtggaggcggatcagagatcgtgctgacccagtcccccgccaccttgagcgtgtcaccaggagagtccgccaccctgtcatgccgcgccagccagtccgtgtcctccaacctggcttggtaccagcagaagccggggcaggcccctagactcctgatctatggggcgtcgacccgggcatctggaattcccgataggttcagcggatcgggctcgggcactgacttcactctgaccatctcctcgctgcaagccgaggacgtggctgtgtactactgtcagcagtacggaagctccctgactttcggtggcgggaccaaagtcgagattaag

SEQ ID NO: 261 - DNA, 717 bp, Artificial Sequence
  Description of Artificial Sequence: Synthetic polynucleotide
gaagtgcaattggtggaaactggaggaggacttgtgcaacctggaggatcattgagactgagctgcgcagtgtcgggattcgccctgagcaaccatggaatgtcctgggtcagaagggcccctggaaaaggcctcgaatgggtgtcagggatcgtgtactccggttccacttactacgccgcctccgtgaaggggcgcttcactatctcacgggataactcccgcaataccctgtacctccaaatgaacagcctgcggccggaggataccgccatctactactgttccgcccacggtggagagtctgacgtctggggccagggaactaccgtgaccgtgtcctccgcgtccggcggtggagggagcggcggccgcgccagcggcggcggaggctccgagatcgtgatgacccagagccccgctactctgtcggtgtcgcccggagaaagggcgaccctgtcctgccgggcgtcgcagtccgtgagcagcaagctggcttggtaccagcagaagccgggccaggcaccacgcctgcttatgtacggtgcctccattcgggccaccggaatcccggaccggttctcggggtcggggtccggtaccgagttcacactgaccatttcctcgctcgagcccgaggactttgccgtctattactgccagcagtacggctcctcctcatggacgttcggccaggggaccaaggtcgaaatcaag

SEQ ID NO: 262 - DNA, 723 bp, Artificial Sequence
  Description of Artificial Sequence: Synthetic polynucleotide
gaagtgcaattggtggagactggaggaggagtggtgcaacctggaggaagcctgagactgtcatgcgcggtgtcgggcttcgccctctccaaccacggaatgtcctgggtccgccgggcccctgggaaaggacttgaatgggtgtccggcatcgtgtactcgggttccacctactacgcggcctcagtgaagggccggtttactattagccgcgacaactccagaaacacactgtacctccaaatgaactcgctgcggccggaagataccgctatctactactgctccgcccatgggggagagtcggacgtctggggacagggcaccactgtcactgtgtccagcgcttccggcggtggtggaagcgggggacgggcctcaggaggcggtggcagcgagattgtgctgacccagtcccccgggaccctgagcctgtccccgggagaaagggccaccctctcctgtcgggcatcccagtccgtggggtctactaaccttgcatggtaccagcagaagcccggccaggcccctcgcctgctgatctacgacgcgtccaatagagccaccggcatcccggatcgcttcagcggaggcggatcgggcaccgacttcaccctcaccatttcaaggctggaaccggaggacttcgccgtgtactactgccagcagtatggttcgtccccaccctggacgttcggccaggggactaaggtcgagatcaag

SEQ ID NO: 263 - DNA, 717 bp, Artificial Sequence
  Description of Artificial Sequence: Synthetic polynucleotide
caagtgcaactcgtggaatctggtggaggactcgtgaaacctggaggatcattgagactgtcatgcgcggcctcgggattcacgttctccgattactacatgagctggattcgccaggctccggggaagggactggaatgggtgtcctacatttcctcatccggctccaccatctactacgcggactccgtgaaggggagattcaccattagccgcgataacgccaagaacagcctgtaccttcagatgaactccctgcgggctgaagatactgccgtctactactgcgcaagggagagcggagatgggatggacgtctggggacagggtaccactgtgaccgtgtcgtcggcctccggcggagggggttcgggtggaagggccagcggcggcggaggcagcgacatccagatgacccagtccccctcatcgctgtccgcctccgtgggcgaccgcgtcaccatcacatgccgggcctcacagtcgatctcctcctacctcaattggtatcagcagaagcccggaaaggcccctaagcttctgatctacgcagcgtcctccctgcaatccggggtcccatctcggttctccggctcgggcagcggtaccgacttcactctgaccatctcgagcctgcagccggaggacttcgccacttactactgtcagcaaagctacaccctcgcgtttggccagggcaccaaagtggacatcaag

SEQ ID NO: 264 - DNA, 717 bp, Artificial Sequence
  Description of Artificial Sequence: Synthetic polynucleotide
gaagtgcaattggtggaatcagggggaggacttgtgcagcctggaggatcgctgagactgtcatgtgccgtgtccggctttgccctgtccaaccacgggatgtcctgggtccgccgcgcgcctggaaagggcctcgaatgggtgtcgggtattgtgtacagcggtagcacctactatgccgcatccgtgaaggggagattcaccatcagccgggacaactccaggaacactctgtacctccaaatgaattcgctgaggccagaggacactgccatctactactgctccgcgcatggcggagagtccgacgtctggggacaggggaccaccgtgaccgtgtctagcgcgtccggcggaggcggcagcgggggtcgggcatcagggggcggcggatcggacatccagctcacccagtccccgagctcgctgtccgcctccgtgggagatcgggtcaccatcacgtgccgcgccagccagtcgatttcctcctacctgaactggtaccaacagaagcccggaaaagccccgaagcttctcatctacgccgcctcgagcctgcagtcaggagtgccctcacggttctccggctccggttccggtactgatttcaccctgaccatttcctccctgcaaccggaggacttcgctacttactactgccagcagtcgtactccaccccctacactttcggacaaggcaccaaggtcgaaatcaag

SEQ ID NO: 265 - DNA, 738 bp, Artificial Sequence
  Description of Artificial Sequence: Synthetic polynucleotide
caagtgcaactggtgcaaagcggaggaggattggtcaaacccggaggaagcctgagactgtcatgcgcggcctctggattcaccttctccgattactacatgtcatggatcagacaggccccggggaagggcctcgaatgggtgtcctacatctcgtcctccgggaacaccatctactacgccgacagcgtgaagggccgctttaccatttcccgcgacaacgcaaagaactcgctgtaccttcagatgaattccctgcgggctgaagataccgcggtgtactattgcgcccggtccactatggtccgggaggactactggggacagggcacactcgtgaccgtgtccagcgcgagcgggggtggaggcagcggtggacgcgcctccggcggcggcggttcagacatcgtgctgactcagtcgcccctgtcgctgccggtcaccctgggccaaccggcctcaattagctgcaagtcctcggagagcctggtgcacaactcaggaaagacttacctgaactggttccatcagcggcctggacagtccccacggaggctcatctatgaagtgtccaacagggattcgggggtgcccgaccgcttcactggctccgggtccggcaccgacttcaccttgaaaatctccagagtggaagccgaggacgtgggcgtgtactactgtatgcagggtacccactggcctggaacctttggacaaggaactaagctcgagattaag

SEQ ID NO: 266 - DNA, 717 bp, Artificial Sequence
  Description of Artificial Sequence: Synthetic polynucleotide
caagtgcaactcgtggaatctggtggaggactcgtgcaacccggtggaagccttaggctgtcgtgcgccgtcagcgggtttgctctgagcaaccatggaatgtcctgggtccgccgggcaccgggaaaagggctggaatgggtgtccggcatcgtgtacagcgggtcaacctattacgccgcgtccgtgaagggcagattcactatctcaagagacaacagccggaacaccctgtacttgcaaatgaattccctgcgccccgaggacaccgccatctactactgctccgcccacggaggagagtcggacgtgtggggccagggaacgactgtgactgtgtccagcgcatcaggagggggtggttcgggcggccgggcctcggggggaggaggttccgacattcggctgacccagtccccgtccccactgtcggcctccgtcggcgaccgcgtgaccatcacttgtcaggcgtccgaggacattaacaagttcctgaactggtaccaccagacccctggaaaggcccccaagctgctgatctacgatgcctcgacccttcaaactggagtgcctagccggttctccgggtccggctccggcactgatttcactctgaccatcaactcattgcagccggaagatatcgggacctactattgccagcagtacgaatccctcccgctcacattcggcgggggaaccaaggtcgagattaag

SEQ ID NO: 267 - DNA, 720 bp, Artificial Sequence
  Description of Artificial Sequence: Synthetic polynucleotide
gaagtgcaattggtggaaactggaggaggacttgtgcaacctggaggatcattgcggctctcatgcgctgtctccggcttcgccctgtcaaatcacgggatgtcgtgggtcagacgggccccgggaaagggtctggaatgggtgtcggggattgtgtacagcggctccacctactacgccgcttcggtcaagggccgcttcactatttcacgggacaacagccgcaacaccctctatctgcaaatgaactctctccgcccggaggataccgccatctactactgctccgcacacggcggcgaatccgacgtgtggggacagggaaccactgtcaccgtgtcgtccgcatccggtggcggaggatcgggtggccgggcctccgggggcggcggcagcgagactaccctgacccagtcccctgccactctgtccgtgagcccgggagagagagccacccttagctgccgggccagccagagcgtgggctccaacctggcctggtaccagcagaagccaggacagggtcccaggctgctgatctacggagcctccactcgcgcgaccggcatccccgcgaggttctccgggtcgggttccgggaccgagttcaccctgaccatctcctccctccaaccggaggacttcgcggtgtactactgtcagcagtacaacgattggctgcccgtgacatttggacaggggacgaaggtggaaatcaaa

SEQ ID NO: 268 - DNA, 723 bp, Artificial Sequence
  Description of Artificial Sequence: Synthetic polynucleotide
gaagtgcaattggtggaatctggtggaggacttgtgcaacctggaggatcactgagactgtcatgcgcggtgtccggttttgccctgagcaatcatgggatgtcgtgggtccggcgcgcccccggaaagggtctggaatgggtgtcgggtatcgtctactccgggagcacttactacgccgcgagcgtgaagggccgcttcaccatttcccgcgataactcccgcaacaccctgtacttgcaaatgaactcgctccggcctgaggacactgccatctactactgctccgcacacggaggagaatccgacgtgtggggccagggaactaccgtgaccgtcagcagcgcctccggcggcgggggctcaggcggacgggctagcggcggcggtggctccgagatcgtgctgacccagtcgcctggcactctctcgctgagccccggggaaagggcaaccctgtcctgtcgggccagccagtccattggatcatcctccctcgcctggtatcagcagaaaccgggacaggctccgcggctgcttatgtatggggccagctcaagagcctccggcattcccgaccggttctccgggtccggttccggcaccgatttcaccctgactatctcgaggctggagccagaggacttcgccgtgtactactgccagcagtacgcggggtccccgccgttcacgttcggacagggaaccaaggtcgagatcaag

SEQ ID NO: 269 - protein, 120 aa, Artificial Sequence
  Description of Artificial Sequence: Synthetic polypeptide
QVQLVESGGGLVQPGRSLRLSCAASGFTFSNYAMSWVRQAPGKGLGWVSGISRSGENTYYADSVKGRFTISRDNSKNTLYLQMNSLRDEDTAVYYCARSPAHYYGGMDVWGQGTTVTVSS

SEQ ID NO: 270 - protein, 115 aa, Artificial Sequence
  Description of Artificial Sequence: Synthetic polypeptide
QVQLVESGGGLVQPGRSLRLSCAASGFTFDDYAMHWVRQAPGKGLEWVSGISWNSGSIGYADSVKGRFTISRDNAKNSLYLQMNSLRAEDTALYYCSVHSFLAYWGQGTLVTVSS

SEQ ID NO: 271 - protein, 115 aa, Artificial Sequence
  Description of Artificial Sequence: Synthetic polypeptide
EVQLLESGGGLVQPGGSLRLSCAVSGFALSNHGMSWVRRAPGKGLEWVSGIVYSGSTYYAASVKGRFTISRDNSRNTLYLQMNSLRPEDTAIYYCSAHGGESDVWGQGTTVTVSS

SEQ ID NO: 272 - protein, 120 aa, Artificial Sequence
  Description of Artificial Sequence: Synthetic polypeptide
QVQLVQSGAEVRKTGASVKVSCKASGYIFDNFGINWVRQAPGQGLEWMGWINPKNNNTNYAQKFQGRVTITADESTNTAYMEVSSLRSEDTAVYYCARGPYYYQSYMDVWGQGTMVTVSS

SEQ ID NO: 273 - protein, 123 aa, Artificial Sequence
  Description of Artificial Sequence: Synthetic polypeptide
QVQLQESGGGLVQPGGSLRLSCAASGFTFSSDAMTWVRQAPGKGLEWVSVISGSGGTTYYADSVKGRFTISRDNSKNTLYLQMNSLRAEDTAVYYCAKLDSSGYYYARGPRYWGQGTLVTVSS

SEQ ID NO: 274 - protein, 118 aa, Artificial Sequence
  Description of Artificial Sequence: Synthetic polypeptide
QVQLVQSGAEVKKPGASVKVSCKASGYTFSNYGITWVRQAPGQGLEWMGWISAYNGNTNYAQKFQGRVTMTRNTSISTAYMELSSLRSEDTAVYYCARGPYYYYMDVWGKGTMVTVSS

SEQ ID NO: 275 - protein, 115 aa, Artificial Sequence
  Description of Artificial Sequence: Synthetic polypeptide
EVQLLETGGGLVQPGGSLRLSCAVSGFALSNHGMSWVRRAPGKGLEWVSGIVYSGSTYYAASVKGRFTISRDNSRNTLYLQMNSLRPEDTAIYYCSAHGGESDVWGQGTTVTVSS

SEQ ID NO: 276 - protein, 115 aa, Artificial Sequence
  Description of Artificial Sequence: Synthetic polypeptide
EVQLVETGGGLVQPGGSLRLSCAVSGFALSNHGMSWVRRAPGKGLEWVSGIVYSGSTYYAASVKGRFTISRDNSRNTLYLQMNSLRPEDTAIYYCSAHGGESDVWGQGTTVTVSS

SEQ ID NO: 277 - protein, 115 aa, Artificial Sequence
  Description of Artificial Sequence: Synthetic polypeptide
EVQLVETGGGVVQPGGSLRLSCAVSGFALSNHGMSWVRRAPGKGLEWVSGIVYSGSTYYAASVKGRFTISRDNSRNTLYLQMNSLRPEDTAIYYCSAHGGESDVWGQGTTVTVSS

SEQ ID NO: 278 - protein, 117 aa, Artificial Sequence
  Description of Artificial Sequence: Synthetic polypeptide
QVQLVESGGGLVKPGGSLRLSCAASGFTFSDYYMSWIRQAPGKGLEWVSYISSSGSTIYYADSVKGRFTISRDNAKNSLYLQMNSLRAEDTAVYYCARESGDGMDVWGQGTTVTVSS

SEQ ID NO: 279 - protein, 115 aa, Artificial Sequence
  Description of Artificial Sequence: Synthetic polypeptide
EVQLVESGGGLVQPGGSLRLSCAVSGFALSNHGMSWVRRAPGKGLEWVSGIVYSGSTYYAASVKGRFTISRDNSRNTLYLQMNSLRPEDTAIYYCSAHGGESDVWGQGTTVTVSS

SEQ ID NO: 280 - protein, 117 aa, Artificial Sequence
  Description of Artificial Sequence: Synthetic polypeptide
QVQLVQSGGGLVKPGGSLRLSCAASGFTFSDYYMSWIRQAPGKGLEWVSYISSSGNTIYYADSVKGRFTISRDNAKNSLYLQMNSLRAEDTAVYYCARSTMVREDYWGQGTLVTVSS

SEQ ID NO: 281 - protein, 115 aa, Artificial Sequence
  Description of Artificial Sequence: Synthetic polypeptide
QVQLVESGGGLVQPGGSLRLSCAVSGFALSNHGMSWVRRAPGKGLEWVSGIVYSGSTYYAASVKGRFTISRDNSRNTLYLQMNSLRPEDTAIYYCSAHGGESDVWGQGTTVTVSS

SEQ ID NO: 282 - protein, 115 aa, Artificial Sequence; identical to SEQ ID NO: 276
  Description of Artificial Sequence: Synthetic polypeptide

SEQ ID NO: 283 - protein, 115 aa, Artificial Sequence; identical to SEQ ID NO: 279
  Description of Artificial Sequence: Synthetic polypeptide

SEQ ID NO: 284 - protein, 109 aa, Artificial Sequence
  Description of Artificial Sequence: Synthetic polypeptide
DIVLTQSPGTLSLSPGERATLSCRASQSISSSFLAWYQQKPGQAPRLLIYGASRRATGIPDRFSGSGSGTDFTLTISRLEPEDSAVYYCQQYHSSPSWTFGQGTKLEIK

SEQ ID NO: 285 - protein, 112 aa, Artificial Sequence
  Description of Artificial Sequence: Synthetic polypeptide
DIVMTQTPLSLPVTPGEPASISCRSSQSLLHSNGYNYLDWYLQKPGQSPQLLIYLGSNRASGVPDRFSGSGSGTDFTLKISRVEAEDVGVYYCMQALQTPYTFGQGTKVEIK

SEQ ID NO: 286 - protein, 111 aa, Artificial Sequence
  Description of Artificial Sequence: Synthetic polypeptide
DIVMTQTPLSLSVTPGQPASISCKSSQSLLRNDGKTPLYWYLQKAGQPPQLLIYEVSNRFSGVPDRFSGSGSGTDFTLKISRVEAEDVGAYYCMQNIQFPSFGGGTKLEIK

SEQ ID NO: 287 - protein, 112 aa, Artificial Sequence
  Description of Artificial Sequence: Synthetic polypeptide
DIVMTQTPLSLPVTPGEPASISCRSSQSLLHSNGYNYLNWYLQKPGQSPQLLIYLGSKRASGVPDRFSGSGSGTDFTLHITRVGAEDVGVYYCMQALQTPYTFGQGTKLEIK

SEQ ID NO: 288 - protein, 106 aa, Artificial Sequence
  Description of Artificial Sequence: Synthetic polypeptide
DIQLTQSPSSLSASVGDRVTITCRASQSISSYLNWYQQKPGKAPKLLIYGASTLASGVPARFSGSGSGTHFTLTINSLQSEDSATYYCQQSYKRASFGQGTKVEIK

SEQ ID NO: 289 - protein, 112 aa, Artificial Sequence
  Description of Artificial Sequence: Synthetic polypeptide
EIVMTQSPLSLPVTPGEPASISCRSSQSLLYSNGYNYVDWYLQKPGQSPQLLIYLGSNRASGVPDRFSGSGSGTDFKLQISRVEAEDVGIYYCMQGRQFPYSFGQGTKVEIK

SEQ ID NO: 290 - protein, 106 aa, Artificial Sequence
  Description of Artificial Sequence: Synthetic polypeptide
EIVLTQSPATLSVSPGESATLSCRASQSVSSNLAWYQQKPGQAPRLLIYGASTRASGIPDRFSGSGSGTDFTLTISSLQAEDVAVYYCQQYGSSLTFGGGTKVEIK

SEQ ID NO: 291 - protein, 107 aa, Artificial Sequence
  Description of Artificial Sequence: Synthetic polypeptide
EIVMTQSPATLSVSPGERATLSCRASQSVSSKLAWYQQKPGQAPRLLMYGASIRATGIPDRFSGSGSGTEFTLTISSLEPEDFAVYYCQQYGSSSWTFGQGTKVEIK

SEQ ID NO: 292 - protein, 109 aa, Artificial Sequence
  Description of Artificial Sequence: Synthetic polypeptide
EIVLTQSPGTLSLSPGERATLSCRASQSVGSTNLAWYQQKPGQAPRLLIYDASNRATGIPDRFSGGGSGTDFTLTISRLEPEDFAVYYCQQYGSSPPWTFGQGTKVEIK

SEQ ID NO: 293 - protein, 105 aa, Artificial Sequence
  Description of Artificial Sequence: Synthetic polypeptide
DIQMTQSPSSLSASVGDRVTITCRASQSISSYLNWYQQKPGKAPKLLIYAASSLQSGVPSRFSGSGSGTDFTLTISSLQPEDFATYYCQQSYTLAFGQGTKVDIK

SEQ ID NO: 294 - protein, 107 aa, Artificial Sequence
  Description of Artificial Sequence: Synthetic polypeptide
DIQLTQSPSSLSASVGDRVTITCRASQSISSYLNWYQQKPGKAPKLLIYAASSLQSGVPSRFSGSGSGTDFTLTISSLQPEDFATYYCQQSYSTPYTFGQGTKVEIK

SEQ ID NO: 295 - protein, 112 aa, Artificial Sequence
  Description of Artificial Sequence: Synthetic polypeptide
DIVLTQSPLSLPVTLGQPASISCKSSESLVHNSGKTYLNWFHQRPGQSPRRLIYEVSNRDSGVPDRFTGSGSGTDFTLKISRVEAEDVGVYYCMQGTHWPGTFGQGTKLEIK

SEQ ID NO: 296 - protein, 107 aa, Artificial Sequence
  Description of Artificial Sequence: Synthetic polypeptide
DIRLTQSPSPLSASVGDRVTITCQASEDINKFLNWYHQTPGKAPKLLIYDASTLQTGVPSRFSGSGSGTDFTLTINSLQPEDIGTYYCQQYESLPLTFGGGTKVEIK

SEQ ID NO: 297 - protein, 108 aa, Artificial Sequence
  Description of Artificial Sequence: Synthetic polypeptide
ETTLTQSPATLSVSPGERATLSCRASQSVGSNLAWYQQKPGQGPRLLIYGASTRATGIPARFSGSGSGTEFTLTISSLQPEDFAVYYCQQYNDWLPVTFGQGTKVEIK

SEQ ID NO: 298 - protein, 109 aa, Artificial Sequence
  Description of Artificial Sequence: Synthetic polypeptide
EIVLTQSPGTLSLSPGERATLSCRASQSIGSSSLAWYQQKPGQAPRLLMYGASSRASGIPDRFSGSGSGTDFTLTISRLEPEDFAVYYCQQYAGSPPFTFGQGTKVEIK

SEQ ID NO: 299-328 - skipped (30 entries)

SEQ ID NO: 329 - protein, 243 aa, Artificial Sequence
  Description of Artificial Sequence: Synthetic polypeptide
QVQLQESGPGLVKPSETLSLTCTVSGGSISSSYYYWGWIRQPPGKGLEWIGSIYYSGSAYYNPSLKSRVTISVDTSKNQFSLRLSSVTAADTAVYYCARHWQEWPDAFDIWGQGTMVTVSSGGGGSGGGGSGGGGSETTLTQSPAFMSATPGDKVIISCKASQDIDDAMNWYQQKPGEAPLFIIQSATSPVPGIPPRFSGSGFGTDFSLTINNIESEDAAYYFCLQHDNFPLTFGQGTKLEIK

SEQ ID NO: 330 - protein, 245 aa, Artificial Sequence
  Description of Artificial Sequence: Synthetic polypeptide
QVNLRESGPALVKPTQTLTLTCTFSGFSLRTSGMCVSWIRQPPGKALEWLARIDWDEDKFYSTSLKTRLTISKDTSDNQVVLRMTNMDPADTATYYCARSGAGGTSATAFDIWGPGTMVTVSSGGGGSGGGGSGGGGSDIQMTQSPSSLSASVGDRVTITCRASQDIYNNLAWFQLKPGSAPRSLMYAANKSQSGVPSRFSGSASGTDFTLTISSLQPEDFATYYCQHYYRFPYSFGQGTKLEIK

SEQ ID NO: 331 - protein, 246 aa, Artificial Sequence
  Description of Artificial Sequence: Synthetic polypeptide
EVQLVESGGGLVKPGGSLRLSCAASGFTFSSYSMNWVRQAPGKGLEWVSSISSSSSYIYYADSVKGRFTISRDNAKNSLYLQMNSLRAEDTAVYYCAKTIAAVYAFDIWGQGTTVTVSSGGGGSGGGGSGGGGSEIVLTQSPLSLPVTPEEPASISCRSSQSLLHSNGYNYLDWYLQKPGQSPQLLIYLGSNRASGVPDRFSGSGSGTDFTLKISRVEAEDVGVYYCMQALQTPYTFGQGTKLEIK

SEQ ID NO: 332 - protein, 240 aa, Artificial Sequence
  Description of Artificial Sequence: Synthetic polypeptide
EVQLVESGGGLVKPGGSLRLSCAASGFTFSDYYMSWIRQAPGKGLEWVSYISSSGSTIYYADSVKGRFTISRDNAKNSLYLQMNSLRAEDTAVYYCARDLRGAFDIWGQGTMVTVSSGGGGSGGGGSGGGGSSYVLTQSPSVSAAPGYTATISCGGNNIGTKSVHWYQQKPGQAPLLVIRDDSVRPSKIPGRFSGSNSGNMATLTISGVQAGDEADFYCQVWDSDSEHVVFGGGTKLTVL

SEQ ID NO: 333 - protein, 241 aa, Artificial Sequence
  Description of Artificial Sequence: Synthetic polypeptide
QVQLVQSGAEVKKPGASVKVSCKPSGYTVTSHYIHWVRRAPGQGLEWMGMINPSGGVTAYSQTLQGRVTMTSDTSSSTVYMELSSLRSEDTAMYYCAREGSGSGWYFDFWGRGTLVTVSSGGGGSGGGGSGGGGSSYVLTQPPSVSVSPGQTASITCSGDGLSKKYVSWYQQKAGQSPVVLISRDKERPSGIPDRFSGSNSADTATLTISGTQAMDEADYYCQAWDDTTVVFGGGTKLTVL

SEQ ID NO: 334 - protein, 245 aa, Artificial Sequence
  Description of Artificial Sequence: Synthetic polypeptide
QVQLQESGPGLVKPSQTLSLTCTVSGGSISSGGYYWSWIRQHPGKGLEWIGYIYYSGSTYYNPSLKSRVTISVDTSKNQFSLKLSSVTAADTAVYYCARAGIAARLRGAFDIWGQGTMVTVSSGGGGSGGGGSGGGGSDIVMTQSPSSVSASVGDRVIITCRASQGIRNWLAWYQQKPGKAPNLLIYAASNLQSGVPSRFSGSGSGADFTLTISSLQPEDVATYYCQKYNSAPFTFGPGTKVDIK

SEQ ID NO: 335 - protein, 253 aa, Artificial Sequence
  Description of Artificial Sequence: Synthetic polypeptide
QVQLVQSGAEVKKPGSSVKVSCKASGGTFSSYAISWVRQAPGQGLEWMGGIIPIFGTANYAQKFQGRVTITADESTSTAYMELSSLRSEDTAVYYCARRGGYQLLRWDVGLLRSAFDIWGQGTMVTVSSGGGGSGGGGSGGGGSSYVLTQPPSVSVAPGQTARITCGGNNIGSKSVHWYQQKPGQAPVLVLYGKNNRPSGVPDRFSGSRSGTTASLTITGAQAEDEADYYCSSRDSSGDHLRVFGTGTKVTVL

SEQ ID NO: 336 - protein, 248 aa, Artificial Sequence
  Description of Artificial Sequence: Synthetic polypeptide
EVQLQQSGPGLVKPSQTLSLTCAISGDSVSSNSAAWNWIRQSPSRGLEWLGRTYYRSKWYSFYAISLKSRIIINPDTSKNQFSLQLKSVTPEDTAVYYCARSSPEGLFLYWFDPWGQGTLVTVSSGGDGSGGGGSGGGGSSSELTQDPAVSVALGQTIRITCQGDSLGNYYATWYQQKPGQAPVLVIYGTNNRPSGIPDRFSASSSGNTASLTITGAQAEDEADYYCNSRDSSGHHLLFGTGTKVTVL

SEQ ID NO: 337 - protein, 246 aa, Artificial Sequence
  Description of Artificial Sequence: Synthetic polypeptide
EVQLVESGGGLVQPGGSLRLSCAASGFTFSSYAMSWVRQAPGKGLEWVSAISGSGGSTYYADSVKGRFTISRDNSKNTLYLQMNSLRAEDTAVYYCAKVEGSGSLDYWGQGTLVTVSSGGGGSGGGGSGGGGSEIVMTQSPGTLSLSPGERATLSCRASQSVSSAYLAWYQQKPGQPPRLLISGASTRATGIPDRFGGSGSGTDFTLTISRLEPEDFAVYYCQHYGSSFNGSSLFTFGQGTRLEIK

SEQ ID NO: 338 - protein, 241 aa, Artificial Sequence
  Description of Artificial Sequence: Synthetic polypeptide
EVQLVETGGGLVQPGGSLRLSCAASGITFSRYPMSWVRQAPGKGLEWVSGISDSGVSTYYADSAKGRFTISRDNSKNTLFLQMSSLRDEDTAVYYCVTRAGSEASDIWGQGTMVTVSSGGGGSGGGGSGGGGSEIVLTQSPATLSLSPGERATLSCRASQSVSNSLAWYQQKPGQAPRLLIYDASSRATGIPDRFSGSGSGTDFTLTISRLEPEDFAIYYCQQFGTSSGLTFGGGTKLEIK

SEQ ID NO: 339 - protein, 248 aa, Artificial Sequence
  Description of Artificial Sequence: Synthetic polypeptide
QVQLVESGGGLVQPGGSLRLSCAASGFTFSSYAMSWVRQAPGKGLEWVSAISGSGGSTYYADSVKGRFTISRDNAKNSLYLQMNSLRAEDTAIYYCARATYKRELRYYYGMDVWGQGTMVTVSSGGGGSGGGGSGGGGSEIVMTQSPGTVSLSPGERATLSCRASQSVSSSFLAWYQQKPGQAPRLLIYGASSRATGIPDRFSGSGSGTDFTLTISRLEPEDSAVYYCQQYHSSPSWTFGQGTRLEIK

SEQ ID NO: 340 - protein, 248 aa, Artificial Sequence
  Description of Artificial Sequence: Synthetic polypeptide
EVQLVETGGGLVQPGGSLRLSCAASGFTFSSYAMSWVRQAPGKGLEWVSAISGSGGSTYYADSVKGRFTISRDNSKNTLYLQMNTLKAEDTAVYYCARATYKRELRYYYGMDVWGQGTTVTVSSGGGGSGGGGSGGGGSEIVLTQSPSTLSLSPGESATLSCRASQSVSTTFLAWYQQKPGQAPRLLIYGSSNRATGIPDRFSGSGSGTDFTLTIRRLEPEDFAVYYCQQYHSSPSWTFGQGTKVEIK

SEQ ID NO: 341 - protein, 239 aa, Artificial Sequence
  Description of Artificial Sequence: Synthetic polypeptide
EVQLVETGGGLVQPGRSLRLSCAASGFTFDDYAMHWVRQAPGKGLEWVSGISWNSGSIGYADSVKGRFTISRDNAKNSLYLQMNSLRDEDTAVYYCARVGKAVPDVWGQGTTVTVSSGGGGSGGGGSGGGGSDIVMTQTPSSLSASVGDRVTITCRASQSISSYLNWYQQKPGKAPKLLIYAASSLQSGVPSRFSGSGSGTDFTLTISSLQPEDFATYYCQQSYSTPYSFGQGTRLEIK

SEQ ID NO: 342 - protein, 246 aa, Artificial Sequence
  Description of Artificial Sequence: Synthetic polypeptide
EVQLVESGGGLVQPGRSLRLSCTASGFTFDDYAMHWVRQRPGKGLEWVASINWKGNSLAYGDSVKGRFAISRDNAKNTVFLQMNSLRTEDTAVYYCASHQGVAYYNYAMDVWGRGTLVTVSSGGGGSGGGGSGGGGSEIVLTQSPGTLSLSPGERATLSCRATQSIGSSFLAWYQQRPGQAPRLLIYGASQRATGIPDRFSGRGSGTDFTLTISRVEPEDSAVYYCQHYESSPSWTFGQGTKVEIK

SEQ ID NO: 343 - protein, 241 aa, Artificial Sequence
  Description of Artificial Sequence: Synthetic polypeptide
EVQLVESGGGLVQPGGSLRLSCAASGFTFSSYAMSWVRQAPGKGLEWVSAISGSGGSTYYADSVKGRFTISRDNSKNTLYLQMNSLRAEDTAVYYCAKVVRDGMDVWGQGTTVTVSSGGGGSGGGGSGGGGSEIVLTQSPATLSLSPGERATLSCRASQSVSSSYLAWYQQKPGQAPRLLIYGASSRATGIPDRFSGNGSGTDFTLTISRLEPEDFAVYYCQQYGSPPRFTFGPGTKVDIK

SEQ ID NO: 344 - protein, 242 aa, Artificial Sequence
  Description of Artificial Sequence: Synthetic polypeptide
EVQLLESGGGLVQPGGSLRLSCAASGFTFSSYAMSWVRQAPGKGLEWVSAISGSGGSTYYADSVKGRFTISRDNSKNTLYLQMNSLRAEDTAVYYCAKIPQTGTFDYWGQGTLVTVSSGGGGSGGGGSGGGGSEIVLTQSPGTLSLSPGERATLSCRASQSVSSSYLAWYQQRPGQAPRLLIYGASSRATGIPDRFSGSGSGTDFTLTISRLEPEDFAVYYCQHYGSSPSWTFGQGTRLEIK

SEQ ID NO: 345 - protein, 248 aa, Artificial Sequence
  Description of Artificial Sequence: Synthetic polypeptide
EVQLVETGGGLVQPGGSLRLSCAASGFTFSSYAMSWVRQAPGKGLEWVSAISGSGGSTYYADSVKGRFTMSRENDKNSVFLQMNSLRVEDTGVYYCARANYKRELRYYYGMDVWGQGTMVTVSSGGGGSGGGGSGGGGSEIVMTQSPGTLSLSPGESATLSCRASQRVASNYLAWYQHKPGQAPSLLISGASSRATGVPDRFSGSGSGTDFTLAISRLEPEDSAVYYCQHYDSSPSWTFGQGTKVEIK

SEQ ID NO: 346 - protein, 244 aa, Artificial Sequence
  Description of Artificial Sequence: Synthetic polypeptide
EVQLLETGGGLVQPGGSLRLSCAASGFSFSSYAMSWVRQAPGKGLEWVSAISGSGGSTYYADSVKGRFTISRDNSKNTLYLQMNSLRAEDTAVYYCAKALVGATGAFDIWGQGTLVTVSSGGGGSGGGGSGGGGSEIVLTQSPGTLSLSPGERATLSCRASQSLSSNFLAWYQQKPGQAPGLLIYGASNWATGTPDRFSGSGSGTDFTLTITRLEPEDFAVYYCQYYGTSPMYTFGQGTKVEIK

SEQ ID NO: 347 - protein, 244 aa, Artificial Sequence
  Description of Artificial Sequence: Synthetic polypeptide
EVQLLESGGGLVQPGGSLRLSCAASGFTFSSYAMSWVRQAPGKGLEWVSAISGSGGSTYYADSVKGRFTISRDNSKNTLYLQMNSLRAEDTAVYYCVLWFGEGFDPWGQGTLVTVSSGGGGSGGGGSGGGGSDIVLTQSPLSLPVTPGEPASISCRSSQSLLHSNGYNYLDWYLQKPGQSPQLLIYLGSNRASGVPDRFSGSGSGTDFTLKISRVEAEDVGVYYCMQALQTPLTFGGGTKVDIK

SEQ ID NO: 348 - protein, 251 aa, Artificial Sequence
  Description of Artificial Sequence: Synthetic polypeptide
QVQLVESGGGLVQPGGSLRLSCAASGFTFSSYAMSWVRQAPGKGLEWVSAISGSGGSTYYADSVKGRFTISRDNSKNTLYLQMNSLRAEDTAVYYCAKVGYDSSGYYRDYYGMDVWGQGTTVTVSSGGGGSGGGGSGGGGSEIVLTQSPGTLSLSPGERATLSCRASQSVSSSYLAWYQQKPGQAPRLLIYGTSSRATGISDRFSGSGSGTDFTLTISRLEPEDFAVYYCQHYGNSPPKFTFGPGTKLEIK

SEQ ID NO: 349 - protein, 246 aa, Artificial Sequence
  Description of Artificial Sequence: Synthetic polypeptide
EVQLVESGGGLVQPGGSLRLSCAASGFTFSSYAMSWVRQAPGKGLEWVSAISGSGGSTYYADSVKGRFTISRDNSKNTLYLQMNSLRAEDTAVYYCAKMGWSSGYLGAFDIWGQGTTVTVSSGGGGSGGGGSGGGGSEIVLTQSPGTLSLSPGERATLSCRASQSVASSFLAWYQQKPGQAPRLLIYGASGRATGIPDRFSGSGSGTDFTLTISRLEPEDFAVYYCQHYGGSPRLTFGGGTKVDIK

SEQ ID NO: 350 - DNA, 729 bp, Artificial Sequence
  Description of Artificial Sequence: Synthetic polynucleotide
caagtgcagcttcaggaaagcggaccgggcctggtcaagccatccgaaactctctccctgacttgcactgtgtctggcggttccatctcatcgtcgtactactactggggctggattaggcagccgcccggaaagggactggagtggatcggaagcatctactattccggctcggcgtactacaaccctagcctcaagtcgagagtgaccatctccgtggatacctccaagaaccagttttccctgcgcctgagctccgtgaccgccgctgacaccgccgtgtactactgtgctcggcattggcaggaatggcccgatgccttcgacatttggggccagggcactatggtcactgtgtcatccgggggtggaggcagcgggggaggagggtccggggggggaggttcagagacaaccttgacccagtcacccgcattcatgtccgccactccgggagacaaggtcatcatctcgtgcaaagcgtcccaggatatcgacgatgccatgaattggtaccagcagaagcctggcgaagcgccgctgttcattatccaatccgcaacctcgcccgtgcctggaatcccaccgcggttcagcggcagcggtttcggaaccgacttttccctgaccattaacaacattgagtccgaggacgccgcctactacttctgcctgcaacacgacaacttccctctcacgttcggccagggaaccaagctggaaatcaag

SEQ ID NO: 351 - DNA, 735 bp, Artificial Sequence
  Description of Artificial Sequence: Synthetic polynucleotide
caagtcaatctgcgcgaatccggccccgccttggtcaagcctacccagaccctcactctgacctgtactttctccggcttctccctgcggacttccgggatgtgcgtgtcctggatcagacagcctccgggaaaggccctggagtggctcgctcgcattgactgggatgaggacaagttctactccacctcactcaagaccaggctgaccatcagcaaagatacctctgacaaccaagtggtgctccgcatgaccaacatggacccagccgacactgccacttactactgcgcgaggagcggagcgggcggaacctccgccaccgccttcgatatttggggcccgggtaccatggtcaccgtgtcaagcggaggaggggggtccgggggcggcggttccgggggaggcggatcggacattcagatgactcagtcaccatcgtccctgagcgctagcgtgggcgacagagtgacaatcacttgccgggcatcccaggacatctataacaaccttgcgtggttccagctgaagcctggttccgcaccgcggtcacttatgtacgccgccaacaagagccagtcgggagtgccgtcccggttttccggttcggcctcgggaactgacttcaccctgacgatctccagcctgcaacccgaggatttcgccacctactactgccagcactactaccgctttccctactcgttcggacagggaaccaagctggaaatcaag

SEQ ID NO: 352 - DNA, 738 bp, Artificial Sequence
  Description of Artificial Sequence: Synthetic polynucleotide
gaagtgcagcttgtcgaatccggggggggactggtcaagccgggcggatcactgagactgtcctgcgccgcgagcggcttcacgttctcctcctactccatgaactgggtccgccaagcccccgggaagggactggaatgggtgtcctctatctcctcgtcgtcgtcctacatctactacgccgactccgtgaagggaagattcaccatttcccgcgacaacgcaaagaactcactgtacttgcaaatgaactcactccgggccgaagatactgctgtgtactattgcgccaagactattgccgccgtctacgctttcgacatctggggccagggaaccaccgtgactgtgtcgtccggtggtggtggctcgggcggaggaggaagcggcggcggggggtccgagattgtgctgacccagtcgccactgagcctccctgtgacccccgaggaacccgccagcatcagctgccggtccagccagtccctgctccactccaacggatacaattacctcgattggtaccttcagaagcctggacaaagcccgcagctgctcatctacttgggatcaaaccgcgcgtcaggagtgcctgaccggttctccggctcgggcagcggtaccgatttcaccctgaaaatctccagggtggaggcagaggacgtgggagtgtattactgtatgcaggcgctgcagactccgtacacatttgggcagggcaccaagctggagatcaag

SEQ ID NO: 353 - DNA, 720 bp, Artificial Sequence
  Description of Artificial Sequence: Synthetic polynucleotide
gaagtccagctcgtggagtccggcggaggccttgtgaagcctggaggttcgctgagactgtcctgcgccgcctccggcttcaccttctccgactactacatgtcctggatcagacaggccccgggaaagggcctggaatgggtgtcctacatctcgtcatcgggcagcactatctactacgcggactcagtgaaggggcggttcaccatttcccgggataacgcgaagaactcgctgtatctgcaaatgaactcactgagggccgaggacaccgccgtgtactactgcgcccgcgatctccgcggggcatttgacatctggggacagggaaccatggtcacagtgtccagcggagggggaggatcgggtggcggaggttccgggggtggaggctcctcctacgtgctgactcagagcccaagcgtcagcgctgcgcccggttacacggcaaccatctcctgtggcggaaacaacattgggaccaagtctgtgcactggtatcagcagaagccgggccaagctcccctgttggtgatccgcgatgactccgtgcggcctagcaaaattccgggacggttctccggctccaacagcggcaatatggccactctcaccatctcgggagtgcaggccggagatgaagccgacttctactgccaagtctgggactcagactccgagcatgtggtgttcgggggcggaaccaagctgactgtgctc

SEQ ID NO: 354 - DNA, 723 bp, Artificial Sequence
  Description of Artificial Sequence: Synthetic polynucleotide
caagtgcagctggtgcagagcggggccgaagtcaagaagccgggagcctccgtgaaagtgtcctgcaagccttcgggatacaccgtgacctcccactacattcattgggtccgccgcgcccccggccaaggactcgagtggatgggcatgatcaaccctagcggcggagtgaccgcgtacagccagacgctgcagggacgcgtgactatgacctcggatacctcctcctccaccgtctatatggaactgtccagcctgcggtccgaggataccgccatgtactactgcgcccgggaaggatcaggctccgggtggtatttcgacttctggggaagaggcaccctcgtgactgtgtcatctgggggagggggttccggtggtggcggatcgggaggaggcggttcatcctacgtgctgacccagccaccctccgtgtccgtgagccccggccagactgcatcgattacatgtagcggcgacggcctctccaagaaatacgtgtcgtggtaccagcagaaggccggacagagcccggtggtgctgatctcaagagataaggagcggcctagcggaatcccggacaggttctcgggttccaactccgcggacactgctactctgaccatctcggggacccaggctatggacgaagccgattactactgccaagcctgggacgacactactgtcgtgtttggagggggcaccaagttgaccgtcctt

SEQ ID NO: 355 - DNA, 735 bp, Artificial Sequence
  Description of Artificial Sequence: Synthetic polynucleotide
caagtgcagcttcaggagagcggcccgggactcgtgaagccgtcccagaccctgtccctgacttgcaccgtgtcgggaggaagcatctcgagcggaggctactattggtcgtggattcggcagcaccctggaaagggcctggaatggatcggctacatctactactccggctcgacctactacaacccatcgctgaagtccagagtgacaatctcagtggacacgtccaagaatcagttcagcctgaagctctcttccgtgactgcggccgacaccgccgtgtactactgcgcacgcgctggaattgccgcccggctgaggggtgccttcgacatttggggacagggcaccatggtcaccgtgtcctccggcggcggaggttccgggggtggaggctcaggaggaggggggtccgacatcgtcatgactcagtcgccctcaagcgtcagcgcgtccgtcggggacagagtgatcatcacctgtcgggcgtcccagggaattcgcaactggctggcctggtatcagcagaagcccggaaaggcccccaacctgttgatctacgccgcctcaaacctccaatccggggtgccgagccgcttcagcggctccggttcgggtgccgatttcactctgaccatctcctccctgcaacctgaagatgtggctacctactactgccaaaagtacaactccgcaccttttactttcggaccggggaccaaagtggacattaag

SEQ ID NO: 356 - DNA, 759 bp, Artificial Sequence
  Description of Artificial Sequence: Synthetic polynucleotide
caagtgcagctggtccagtcgggcgccgaggtcaagaagcccgggagctctgtgaaagtgtcctgcaaggcctccgggggcacctttagctcctacgccatctcctgggtccgccaagcaccgggtcaaggcctggagtggatggggggaattatccctatcttcggcactgccaactacgcccagaagttccagggacgcgtgaccattaccgcggacgaatccacctccaccgcttatatggagctgtccagcttgcgctcggaagataccgccgtgtactactgcgcccggaggggtggataccagctgctgagatgggacgtgggcctcctgcggtcggcgttcgacatctggggccagggcactatggtcactgtgtccagcggaggaggcggatcgggaggcggcggatcagggggaggcggttccagctacgtgcttactcaacccccttcggtgtccgtggccccgggacagaccgccagaatcacttgcggaggaaacaacattgggtccaagagcgtgcattggtaccagcagaagccaggacaggcccctgtgctggtgctctacgggaagaacaatcggcccagcggagtgccggacaggttctcgggttcacgctccggtacaaccgcttcactgactatcaccggggcccaggcagaggatgaagcggactactactgttcctcccgggattcatccggcgaccacctccgggtgttcggaaccggaacgaaggtcaccgtgctg

SEQ ID NO: 357 - DNA, 744 bp, Artificial Sequence
  Description of Artificial Sequence: Synthetic polynucleotide
gaagtgcagctccaacagtcaggaccggggctcgtgaagccatcccagaccctgtccctgacttgtgccatctcgggagatagcgtgtcatcgaactccgccgcctggaactggattcggcagagcccgtcccgcggactggagtggcttggaaggacctactaccggtccaagtggtactctttctacgcgatctcgctgaagtcccgcattatcattaaccctgatacctccaagaatcagttctccctccaactgaaatccgtcacccccgaggacacagcagtgtattactgcgcacggagcagccccgaaggactgttcctgtattggtttgacccctggggccaggggactcttgtgaccgtgtcgagcggcggagatgggtccggtggcggtggttcggggggcggcggatcatcatccgaactgacccaggacccggctgtgtccgtggcgctgggacaaaccatccgcattacgtgccagggagactccctgggcaactactacgccacttggtaccagcagaagccgggccaagcccctgtgttggtcatctacgggaccaacaacagaccttccggcatccccgaccggttcagcgcttcgtcctccggcaacactgccagcctgaccatcactggagcgcaggccgaagatgaggccgactactactgcaacagcagagactcctcgggtcatcacctcttgttcggaactggaaccaaggtcaccgtgctg

SEQ ID NO: 358 - DNA, 738 bp, Artificial Sequence
  Description of Artificial Sequence: Synthetic polynucleotide
gaagtgcagctcgtggagtcaggaggcggcctggtccagccgggagggtcccttagactgtcatgcgccgcaagcggattcactttctcctcctatgccatgagctgggtccgccaagcccccggaaagggactggaatgggtgtccgccatctcggggtctggaggctcaacttactacgctgactccgtgaagggacggttcaccattagccgcgacaactccaagaacaccctctacctccaaatgaactccctgcgggccgaggataccgccgtctactactgcgccaaagtggaaggttcaggatcgctggactactggggacagggtactctcgtgaccgtgtcatcgggcggaggaggttccggcggtggcggctccggcggcggagggtcggagatcgtgatgacccagagccctggtactctgagcctttcgccgggagaaagggccaccctgtcctgccgcgcttcccaatccgtgtcctccgcgtacttggcgtggtaccagcagaagccgggacagccccctcggctgctgatcagcggggccagcacccgggcaaccggaatcccagacagattcgggggttccggcagcggcacagatttcaccctgactatttcgaggttggagcccgaggactttgcggtgtattactgtcagcactacgggtcgtcctttaatggctccagcctgttcacgttcggacaggggacccgcctggaaatcaag

SEQ ID NO: 359 - DNA, 723 bp, Artificial Sequence
  Description of Artificial Sequence: Synthetic polynucleotide
gaagtgcaactggtggaaaccggtggcggcctggtgcagcctggaggatcattgaggctgtcatgcgcggccagcggtattaccttctcccggtaccccatgtcctgggtcagacaggccccggggaaagggcttgaatgggtgtccgggatctcggactccggtgtcagcacttactacgccgactccgccaagggacgcttcaccatttcccgggacaactcgaagaacaccctgttcctccaaatgagctccctccgggacgaggatactgcagtgtactactgcgtgacccgcgccgggtccgaggcgtctgacatttggggacagggcactatggtcaccgtgtcgtccggcggagggggctcgggaggcggtggcagcggaggaggagggtccgagatcgtgctgacccaatccccggccaccctctcgctgagccctggagaaagggcaaccttgtcctgtcgcgcgagccagtccgtgagcaactccctggcctggtaccagcagaagcccggacaggctccgagacttctgatctacgacgcttcgagccgggccactggaatccccgaccgcttttcggggtccggctcaggaaccgatttcaccctgacaatctcacggctggagccagaggatttcgccatctattactgccagcagttcggtacttcctccggcctgactttcggaggcggcacgaagctcgaaatcaag

SEQ ID NO: 360 - DNA, 744 bp, Artificial Sequence
  Description of Artificial Sequence: Synthetic polynucleotide
caagtgcagctcgtggaatcgggtggcggactggtgcagccggggggctcacttagactgtcctgcgcggccagcggattcactttctcctcctacgccatgtcctgggtcagacaggcccctggaaagggcctggaatgggtgtccgcaatcagcggcagcggcggctcgacctattacgcggattcagtgaagggcagattcaccatttcccgggacaacgccaagaactccttgtaccttcaaatgaactccctccgcgcggaagataccgcaatctactactgcgctcgggccacttacaagagggaactgcgctactactacgggatggacgtctggggccagggaaccatggtcaccgtgtccagcggaggaggaggatcgggaggaggcggtagcgggggtggagggtcggagatcgtgatgacccagtcccccggcactgtgtcgctgtcccccggcgaacgggccaccctgtcatgtcgggccagccagtcagtgtcgtcaagcttcctcgcctggtaccagcagaaaccgggacaagctccccgcctgctgatctacggagccagcagccgggccaccggtattcctgaccggttctccggttcggggtccgggaccgactttactctgactatctctcgcctcgagccagaggactccgccgtgtattactgccagcagtaccactcctccccgtcctggacgttcggacagggcacaaggctggagattaag

SEQ ID NO: 361 - DNA, 744 bp, Artificial Sequence
  Description of Artificial Sequence: Synthetic polynucleotide
gaggtgcagcttgtggaaaccggtggcggactggtgcagcccggaggaagcctcaggctgtcctgcgccgcgtccggcttcaccttctcctcgtacgccatgtcctgggtccgccaggcccccggaaagggcctggaatgggtgtccgccatctctggaagcggaggttccacgtactacgcggacagcgtcaagggaaggttcacaatctcccgcgataattcgaagaacactctgtaccttcaaatgaacaccctgaaggccgaggacactgctgtgtactactgcgcacgggccacctacaagagagagctccggtactactacggaatggacgtctggggccagggaactactgtgaccgtgtcctcgggagggggtggctccggggggggcggctccggcggaggcggttccgagattgtgctgacccagtcaccttcaactctgtcgctgtccccgggagagagcgctactctgagctgccgggccagccagtccgtgtccaccaccttcctcgcctggtatcagcagaagccggggcaggcaccacggctcttgatctacgggtcaagcaacagagcgaccggaattcctgaccgcttctcggggagcggttcaggcaccgacttcaccctgactatccggcgcctggaacccgaagatttcgccgtgtattactgtcaacagtaccactcctcgccgtcctggacctttggccaaggaaccaaagtggaaatcaag

SEQ ID NO: 362 - DNA, 717 bp, Artificial Sequence
  Description of Artificial Sequence: Synthetic polynucleotide
gaagtgcagctcgtggaaactggaggtggactcgtgcagcctggacggtcgctgcggctgagctgcgctgcatccggcttcaccttcgacgattatgccatgcactgggtcagacaggcgccagggaagggacttgagtgggtgtccggtatcagctggaatagcggctcaatcggatacgcggactccgtgaagggaaggttcaccatttcccgcgacaacgccaagaactccctgtacttgcaaatgaacagcctccgggatgaggacactgccgtgtactactgcgcccgcgtcggaaaagctgtgcccgacgtctggggccagggaaccactgtgaccgtgtccagcggcgggggtggatcgggcggtggagggtccggtggagggggctcagatattgtgatgacccagaccccctcgtccctgtccgcctcggtcggcgaccgcgtgactatcacatgtagagcctcgcagagcatctccagctacctgaactggtatcagcagaagccggggaaggccccgaagctcctgatctacgcggcatcatcactgcaatcgggagtgccgagccggttttccgggtccggctccggcaccgacttcacgctgaccatttcttccctgcaacccgaggacttcgccacttactactgccagcagtcctactccaccccttactccttcggccaaggaaccaggctggaaatcaag

SEQ ID NO: 363 - DNA, 738 bp, Artificial Sequence
  Description of Artificial Sequence: Synthetic polynucleotide
gaagtgcagctcgtggagagcgggggaggattggtgcagcccggaaggtccctgcggctctcctgcactgcgtctggcttcaccttcgacgactacgcgatgcactgggtcagacagcgcccgggaaagggcctggaatgggtcgcctcaatcaactggaagggaaactccctggcctatggcgacagcgtgaagggccgcttcgccatttcgcgcgacaacgccaagaacaccgtgtttctgcaaatgaattccctgcggaccgaggataccgctgtgtactactgcgccagccaccagggcgtggcatactataactacgccatggacgtgtggggaagagggacgctcgtcaccgtgtcctccgggggcggtggatcgggtggaggaggaagcggtggcgggggcagcgaaatcgtgctgactcagagcccgggaactctttcactgtccccgggagaacgggccactctctcgtgccgggccacccagtccatcggctcctccttccttgcctggtaccagcagaggccaggacaggcgccccgcctgctgatctacggtgcttcccaacgcgccactggcattcctgaccggttcagcggcagagggtcgggaaccgatttcacactgaccatttcccgggtggagcccgaagattcggcagtctactactgtcagcattacgagtcctccccttcatggaccttcggtcaagggaccaaagtggagatcaag

SEQ ID NO: 364 - DNA, 723 bp, Artificial Sequence
  Description of Artificial Sequence: Synthetic polynucleotide
gaggtgcagttggtcgaaagcgggggcgggcttgtgcagcctggcggatcactgcggctgtcctgcgcggcatcaggcttcacgttttcttcctacgccatgtcctgggtgcgccaggcccctggaaagggactggaatgggtgtccgcgatttcggggtccggcgggagcacctactacgccgattccgtgaagggccgcttcactatctcgcgggacaactccaagaacaccctctacctccaaatgaatagcctgcgggccgaggataccgccgtctactattgcgctaaggtcgtgcgcgacggaatggacgtgtggggacagggtaccaccgtgacagtgtcctcggggggaggcggtagcggcggaggaggaagcggtggtggaggttccgagattgtgctgactcaatcacccgcgaccctgagcctgtcccccggcgaaagggccactctgtcctgtcgggccagccaatcagtctcctcctcgtacctggcctggtaccagcagaagccaggacaggctccgagactccttatctatggcgcatcctcccgcgccaccggaatcccggataggttctcgggaaacggatcggggaccgacttcactctcaccatctcccggctggaaccggaggacttcgccgtgtactactgccagcagtacggcagcccgcctagattcactttcggccccggcaccaaagtggacatcaag

SEQ ID NO: 365 - DNA, 726 bp, Artificial Sequence
  Description of Artificial Sequence: Synthetic polynucleotide
gaagtgcagctgctggagtccggcggtggattggtgcaaccggggggatcgctcagactgtcctgtgcggcgtcaggcttcaccttctcgagctacgccatgtcatgggtcagacaggcccctggaaagggtctggaatgggtgtccgccatttccgggagcgggggatctacatactacgccgatagcgtgaagggccgcttcaccatttcccgggacaactccaagaacactctctatctgcaaatgaactccctccgcgctgaggacactgccgtgtactactgcgccaaaatccctcagaccggcaccttcgactactggggacaggggactctggtcaccgtcagcagcggtggcggaggttcggggggaggaggaagcggcggcggagggtccgagattgtgctgacccagtcacccggcactttgtccctgtcgcctggagaaagggccaccctttcctgccgggcatcccaatccgtgtcctcctcgtacctggcctggtaccagcagaggcccggacaggccccacggcttctgatctacggagcaagcagccgcgcgaccggtatcccggaccggttttcgggctcgggctcaggaactgacttcaccctcaccatctcccgcctggaacccgaagatttcgctgtgtattactgccagcactacggcagctccccgtcctggacgttcggccagggaactcggctggagatcaag

SEQ ID NO: 366 - DNA, 744 bp, Artificial Sequence
  Description of Artificial Sequence: Synthetic polynucleotide
gaagtgcaactggtggaaaccggtggaggactcgtgcagcctggcggcagcctccggctgagctgcgccgcttcgggattcaccttttcctcctacgcgatgtcttgggtcagacaggcccccggaaaggggctggaatgggtgtcagccatctccggctccggcggatcaacgtactacgccgactccgtgaaaggccggttcaccatgtcgcgcgagaatgacaagaactccgtgttcctgcaaatgaactccctgagggtggaggacaccggagtgtactattgtgcgcgcgccaactacaagagagagctgcggtactactacggaatggacgtctggggacagggaactatggtgaccgtgtcatccggtggagggggaagcggcggtggaggcagcgggggcgggggttcagaaattgtcatgacccagtccccgggaactctttccctctcccccggggaatccgcgactttgtcctgccgggccagccagcgcgtggcctcgaactacctcgcatggtaccagcataagccaggccaagccccttccctgctgatttccggggctagcagccgcgccactggcgtgccggataggttctcgggaagcggctcgggtaccgatttcaccctggcaatctcgcggctggaaccggaggattcggccgtgtactactgccagcactatgactcatccccctcctggacattcggacagggcaccaaggtcgagatcaag

SEQ ID NO: 367 - DNA, 732 bp, Artificial Sequence
  Description of Artificial Sequence: Synthetic polynucleotide
gaagtgcagctgctcgaaaccggtggagggctggtgcagccagggggctccctgaggctttcatgcgccgctagcggattctccttctcctcttacgccatgtcgtgggtccgccaagcccctggaaaaggcctggaatgggtgtccgcgatttccgggagcggaggttcgacctattacgccgactccgtgaagggccgctttaccatctcccgggataactccaagaacactctgtacctccaaatgaactcgctgagagccgaggacaccgccgtgtattactgcgcgaaggcgctggtcggcgcgactggggcattcgacatctggggacagggaactcttgtgaccgtgtcgagcggaggcggcggctccggcggaggagggagcgggggcggtggttccgaaatcgtgttgactcagtccccgggaaccctgagcttgtcacccggggagcgggccactctctcctgtcgcgcctcccaatcgctctcatccaatttcctggcctggtaccagcagaagcccggacaggccccgggcctgctcatctacggcgcttcaaactgggcaacgggaacccctgatcggttcagcggaagcggatcgggtactgactttaccctgaccatcaccagactggaaccggaggacttcgccgtgtactactgccagtactacggcacctcccccatgtacacattcggacagggtaccaaggtcgagattaag

SEQ ID NO: 368 - DNA, 733 bp, Artificial Sequence
  Description of Artificial Sequence: Synthetic polynucleotide
gaagtgcagctgcttgagagcggtggaggtctggtgcagcccgggggatcactgcgcctgtcctgtgccgcgtccggtttcactttctcctcgtacgccatgtcgtgggtcagacaggcaccgggaaagggactggaatgggtgtcagccatttcgggttcggggggcagcacctactacgctgactccgtgaagggccggttcaccatttcccgcgacaactccaagaacaccttgtacctccaaatgaactccctgcgggccgaagataccgccgtgtattactgcgtgctgtggttcggagagggattcgacccgtggggacaaggaacactcgtgactgtgtcatccggcggaggcggcagcggtggcggcggttccggcggcggcggatctgacatcgtgttgacccagtcccctctgagcctgccggtcactcctggcgaaccagccagcatctcctgccggtcgagccagtccctcctgcactccaatgggtacaactacctcgattggtatctgcaaaagccgggccagagcccccagctgctgatctaccttgggtcaaaccgcgcttccggggtgcctgatagattctccgggtccgggagcggaaccgactttaccctgaaaatctcgagggtggaggccgaggacgtcggagtgtactactgcatgcaggcgctccagactcccctgaccttcggaggaggaacgaaggtcgacatcaaga

SEQ ID NO: 369 - DNA, 753 bp, Artificial Sequence
  Description of Artificial Sequence: Synthetic polynucleotide
caagtgcagctcgtggagtcaggcggaggactggtgcagcccgggggctccctgagactttcctgcgcggcatcgggttttaccttctcctcctatgctatgtcctgggtgcgccaggccccgggaaagggactggaatgggtgtccgcaatcagcggtagcgggggctcaacatactacgccgactccgtcaagggtcgcttcactatttcccgggacaactccaagaataccctgtacctccaaatgaacagcctcagggccgaggatactgccgtgtactactgcgccaaagtcggatacgatagctccggttactaccgggactactacggaatggacgtgtggggacagggcaccaccgtgaccgtgtcaagcggcggaggcggttcaggagggggaggctccggcggtggagggtccgaaatcgtcctgactcagtcgcctggcactctgtcgttgtccccgggggagcgcgctaccctgtcgtgtcgggcgtcgcagtccgtgtcgagctcctacctcgcgtggtaccagcagaagcccggacaggcccctagacttctgatctacggcacttcttcacgcgccaccgggatcagcgacaggttcagcggctccggctccgggaccgacttcaccctgaccattagccggctggagcctgaagatttcgccgtgtattactgccaacactacggaaactcgccgccaaagttcacgttcggacccggaaccaagctggaaatcaag

SEQ ID NO: 370 - DNA, 739 bp, Artificial Sequence
  Description of Artificial Sequence: Synthetic polynucleotide
gaagtccaactggtggagtccgggggagggctcgtgcagcccggaggcagccttcggctgtcgtgcgccgcctccgggttcacgttctcatcctacgcgatgtcgtgggtcagacaggcaccaggaaagggactggaatgggtgtccgccattagcggctccggcggtagcacctactatgccgactcagtgaagggaaggttcactatctcccgcgacaacagcaagaacaccctgtacctccaaatgaactctctgcgggccgaggataccgcggtgtactattgcgccaagatgggttggtccagcggatacttgggagccttcgacatttggggacagggcactactgtgaccgtgtcctccgggggtggcggatcgggaggcggcggctcgggtggagggggttccgaaatcgtgttgacccagtcaccgggaaccctctcgctgtccccgggagaacgggctacactgtcatgtagagcgtcccagtccgtggcttcctcgttcctggcctggtaccagcagaagccgggacaggcaccccgcctgctcatctacggagccagcggccgggcgaccggcatccctgaccgcttctccggttccggctcgggcaccgactttactctgaccattagcaggcttgagcccgaggattttgccgtgtactactgccaacactacggggggagccctcgcctgaccttcggaggcggaactaaggtcgatatcaaaa

SEQ ID NO: 371 - protein, 121 aa, Artificial Sequence
  Description of Artificial Sequence: Synthetic polypeptide
QVQLQESGPGLVKPSETLSLTCTVSGGSISSSYYYWGWIRQPPGKGLEWIGSIYYSGSAYYNPSLKSRVTISVDTSKNQFSLRLSSVTAADTAVYYCARHWQEWPDAFDIWGQGTMVTVSS

SEQ ID NO: 372 - protein, 123 aa, Artificial Sequence
  Description of Artificial Sequence: Synthetic polypeptide
QVNLRESGPALVKPTQTLTLTCTFSGFSLRTSGMCVSWIRQPPGKALEWLARIDWDEDKFYSTSLKTRLTISKDTSDNQVVLRMTNMDPADTATYYCARSGAGGTSATAFDIWGPGTMVTVSS

SEQ ID NO: 373 - protein, 119 aa, Artificial Sequence
  Description of Artificial Sequence: Synthetic polypeptide
EVQLVESGGGLVKPGGSLRLSCAASGFTFSSYSMNWVRQAPGKGLEWVSSISSSSSYIYYADSVKGRFTISRDNAKNSLYLQMNSLRAEDTAVYYCAKTIAAVYAFDIWGQGTTVTVSS

SEQ ID NO: 374 - protein, 117 aa, Artificial Sequence
  Description of Artificial Sequence: Synthetic polypeptide
EVQLVESGGGLVKPGGSLRLSCAASGFTFSDYYMSWIRQAPGKGLEWVSYISSSGSTIYYADSVKGRFTISRDNAKNSLYLQMNSLRAEDTAVYYCARDLRGAFDIWGQGTMVTVSS

SEQ ID NO: 375 - protein, 120 aa, Artificial Sequence
  Description of Artificial Sequence: Synthetic polypeptide
QVQLVQSGAEVKKPGASVKVSCKPSGYTVTSHYIHWVRRAPGQGLEWMGMINPSGGVTAYSQTLQGRVTMTSDTSSSTVYMELSSLRSEDTAMYYCAREGSGSGWYFDFWGRGTLVTVSS

SEQ ID NO: 376 - protein, 123 aa, Artificial Sequence
  Description of Artificial Sequence: Synthetic polypeptide
QVQLQESGPGLVKPSQTLSLTCTVSGGSISSGGYYWSWIRQHPGKGLEWIGYIYYSGSTYYNPSLKSRVTISVDTSKNQFSLKLSSVTAADTAVYYCARAGIAARLRGAFDIWGQGTMVTVSS

SEQ ID NO: 377 - protein, 129 aa, Artificial Sequence
  Description of Artificial Sequence: Synthetic polypeptide
QVQLVQSGAEVKKPGSSVKVSCKASGGTFSSYAISWVRQAPGQGLEWMGGIIPIFGTANYAQKFQGRVTITADESTSTAYMELSSLRSEDTAVYYCARRGGYQLLRWDVGLLRSAFDIWGQGTMVTVSS

SEQ ID NO: 378 - protein, 125 aa, Artificial Sequence
  Description of Artificial Sequence: Synthetic polypeptide
EVQLQQSGPGLVKPSQTLSLTCAISGDSVSSNSAAWNWIRQSPSRGLEWLGRTYYRSKWYSFYAISLKSRIIINPDTSKNQFSLQLKSVTPEDTAVYYCARSSPEGLFLYWFDPWGQGTLVTVSS

SEQ ID NO: 379 - protein, 118 aa, Artificial Sequence
  Description of Artificial Sequence: Synthetic polypeptide
EVQLVESGGGLVQPGGSLRLSCAASGFTFSSYAMSWVRQAPGKGLEWVSAISGSGGSTYYADSVKGRFTISRDNSKNTLYLQMNSLRAEDTAVYYCAKVEGSGSLDYWGQGTLVTVSS

SEQ ID NO: 380 - protein, 118 aa, Artificial Sequence
  Description of Artificial Sequence: Synthetic polypeptide
EVQLVETGGGLVQPGGSLRLSCAASGITFSRYPMSWVRQAPGKGLEWVSGISDSGVSTYYADSAKGRFTISRDNSKNTLFLQMSSLRDEDTAVYYCVTRAGSEASDIWGQGTMVTVSS

SEQ ID NO: 381 - protein, 124 aa, Artificial Sequence
  Description of Artificial Sequence: Synthetic polypeptide
QVQLVESGGGLVQPGGSLRLSCAASGFTFSSYAMSWVRQAPGKGLEWVSAISGSGGSTYYADSVKGRFTISRDNAKNSLYLQMNSLRAEDTAIYYCARATYKRELRYYYGMDVWGQGTMVTVSS

SEQ ID NO: 382 - protein, 124 aa, Artificial Sequence
  Description of Artificial Sequence: Synthetic polypeptide
EVQLVETGGGLVQPGGSLRLSCAASGFTFSSYAMSWVRQAPGKGLEWVSAISGSGGSTYYADSVKGRFTISRDNSKNTLYLQMNTLKAEDTAVYYCARATYKRELRYYYGMDVWGQGTTVTVSS

SEQ ID NO: 383 - protein, 117 aa, Artificial Sequence
  Description of Artificial Sequence: Synthetic polypeptide
EVQLVETGGGLVQPGRSLRLSCAASGFTFDDYAMHWVRQAPGKGLEWVSGISWNSGSIGYADSVKGRFTISRDNAKNSLYLQMNSLRDEDTAVYYCARVGKAVPDVWGQGTTVTVSS

SEQ ID NO: 384 - protein, 122 aa, Artificial Sequence
  Description of Artificial Sequence: Synthetic polypeptide
EVQLVESGGGLVQPGRSLRLSCTASGFTFDDYAMHWVRQRPGKGLEWVASINWKGNSLAYGDSVKGRFAISRDNAKNTVFLQMNSLRTEDTAVYYCASHQGVAYYNYAMDVWGRGTLVTVSS

SEQ ID NO: 385 - protein, 117 aa, Artificial Sequence
  Description of Artificial Sequence: Synthetic polypeptide
EVQLVESGGGLVQPGGSLRLSCAASGFTFSSYAMSWVRQAPGKGLEWVSAISGSGGSTYYADSVKGRFTISRDNSKNTLYLQMNSLRAEDTAVYYCAKVVRDGMDVWGQGTTVTVSS

SEQ ID NO: 386 - protein, 118 aa, Artificial Sequence
  Description of Artificial Sequence: Synthetic polypeptide
EVQLLESGGGLVQPGGSLRLSCAASGFTFSSYAMSWVRQAPGKGLEWVSAISGSGGSTYYADSVKGRFTISRDNSKNTLYLQMNSLRAEDTAVYYCAKIPQTGTFDYWGQGTLVTVSS

SEQ ID NO: 387 - protein, 124 aa, Artificial Sequence
  Description of Artificial Sequence: Synthetic polypeptide
EVQLVETGGGLVQPGGSLRLSCAASGFTFSSYAMSWVRQAPGKGLEWVSAISGSGGSTYYADSVKGRFTMSRENDKNSVFLQMNSLRVEDTGVYYCARANYKRELRYYYGMDVWGQGTMVTVSS

SEQ ID NO: 388 - protein, 120 aa, Artificial Sequence
  Description of Artificial Sequence: Synthetic polypeptide
EVQLLETGGGLVQPGGSLRLSCAASGFSFSSYAMSWVRQAPGKGLEWVSAISGSGGSTYYADSVKGRFTISRDNSKNTLYLQMNSLRAEDTAVYYCAKALVGATGAFDIWGQGTLVTVSS

SEQ ID NO: 389 - protein, 117 aa, Artificial Sequence
  Description of Artificial Sequence: Synthetic polypeptide
EVQLLESGGGLVQPGGSLRLSCAASGFTFSSYAMSWVRQAPGKGLEWVSAISGSGGSTYYADSVKGRFTISRDNSKNTLYLQMNSLRAEDTAVYYCVLWFGEGFDPWGQGTLVTVSS

SEQ ID NO: 390 - protein, 126 aa, Artificial Sequence
  Description of Artificial Sequence: Synthetic polypeptide
QVQLVESGGGLVQPGGSLRLSCAASGFTFSSYAMSWVRQAPGKGLEWVSAISGSGGSTYYADSVKGRFTISRDNSKNTLYLQMNSLRAEDTAVYYCAKVGYDSSGYYRDYYGMDVWGQGTTVTVSS

SEQ ID NO: 391 - protein, 122 aa, Artificial Sequence
  Description of Artificial Sequence: Synthetic polypeptide
EVQLVESGGGLVQPGGSLRLSCAASGFTFSSYAMSWVRQAPGKGLEWVSAISGSGGSTYYADSVKGRFTISRDNSKNTLYLQMNSLRAEDTAVYYCAKMGWSSGYLGAFDIWGQGTTVTVSS

SEQ ID NO: 392 - protein, 107 aa, Artificial Sequence
  Description of Artificial Sequence: Synthetic polypeptide
ETTLTQSPAFMSATPGDKVIISCKASQDIDDAMNWYQQKPGEAPLFIIQSATSPVPGIPPRFSGSGFGTDFSLTINNIESEDAAYYFCLQHDNFPLTFGQGTKLEIK

SEQ ID NO: 393 - protein, 107 aa, Artificial Sequence
  Description of Artificial Sequence: Synthetic polypeptide
DIQMTQSPSSLSASVGDRVTITCRASQDIYNNLAWFQLKPGSAPRSLMYAANKSQSGVPSRFSGSASGTDFTLTISSLQPEDFATYYCQHYYRFPYSFGQGTKLEIK

SEQ ID NO: 394 - protein, 112 aa, Artificial Sequence
  Description of Artificial Sequence: Synthetic polypeptide
EIVLTQSPLSLPVTPEEPASISCRSSQSLLHSNGYNYLDWYLQKPGQSPQLLIYLGSNRASGVPDRFSGSGSGTDFTLKISRVEAEDVGVYYCMQALQTPYTFGQGTKLEIK

SEQ ID NO: 395 - protein, 108 aa, Artificial Sequence
  Description of Artificial Sequence: Synthetic polypeptide
SYVLTQSPSVSAAPGYTATISCGGNNIGTKSVHWYQQKPGQAPLLVIRDDSVRPSKIPGRFSGSNSGNMATLTISGVQAGDEADFYCQVWDSDSEHVVFGGGTKLTVL

SEQ ID NO: 396 - protein, 106 aa, Artificial Sequence
  Description of Artificial Sequence: Synthetic polypeptide
SYVLTQPPSVSVSPGQTASITCSGDGLSKKYVSWYQQKAGQSPVVLISRDKERPSGIPDRFSGSNSADTATLTISGTQAMDEADYYCQAWDDTTVVFGGGTKLTVL

SEQ ID NO: 397 - protein, 107 aa, Artificial Sequence
  Description of Artificial Sequence: Synthetic polypeptide
DIVMTQSPSSVSASVGDRVIITCRASQGIRNWLAWYQQKPGKAPNLLIYAASNLQSGVPSRFSGSGSGADFTLTISSLQPEDVATYYCQKYNSAPFTFGPGTKVDIK

SEQ ID NO: 398 - protein, 109 aa, Artificial Sequence
  Description of Artificial Sequence: Synthetic polypeptide
SYVLTQPPSVSVAPGQTARITCGGNNIGSKSVHWYQQKPGQAPVLVLYGKNNRPSGVPDRFSGSRSGTTASLTITGAQAEDEADYYCSSRDSSGDHLRVFGTGTKVTVL

SEQ ID NO: 399 - protein, 108 aa, Artificial Sequence
  Description of Artificial Sequence: Synthetic polypeptide
SSELTQDPAVSVALGQTIRITCQGDSLGNYYATWYQQKPGQAPVLVIYGTNNRPSGIPDRFSASSSGNTASLTITGAQAEDEADYYCNSRDSSGHHLLFGTGTKVTVL

SEQ ID NO: 400 - protein, 113 aa, Artificial Sequence
  Description of Artificial Sequence: Synthetic polypeptide
EIVMTQSPGTLSLSPGERATLSCRASQSVSSAYLAWYQQKPGQPPRLLISGASTRATGIPDRFGGSGSGTDFTLTISRLEPEDFAVYYCQHYGSSFNGSSLFTFGQGTRLEIK

SEQ ID NO: 401 - protein, 108 aa, Artificial Sequence
  Description of Artificial Sequence: Synthetic polypeptide
EIVLTQSPATLSLSPGERATLSCRASQSVSNSLAWYQQKPGQAPRLLIYDASSRATGIPDRFSGSGSGTDFTLTISRLEPEDFAIYYCQQFGTSSGLTFGGGTKLEIK

SEQ ID NO: 402 - protein, 109 aa, Artificial Sequence
  Description of Artificial Sequence: Synthetic polypeptide
EIVMTQSPGTVSLSPGERATLSCRASQSVSSSFLAWYQQKPGQAPRLLIYGASSRATGIPDRFSGSGSGTDFTLTISRLEPEDSAVYYCQQYHSSPSWTFGQGTRLEIK

SEQ ID NO: 403 - protein, 109 aa, Artificial Sequence
  Description of Artificial Sequence: Synthetic polypeptide
EIVLTQSPSTLSLSPGESATLSCRASQSVSTTFLAWYQQKPGQAPRLLIYGSSNRATGIPDRFSGSGSGTDFTLTIRRLEPEDFAVYYCQQYHSSPSWTFGQGTKVEIK

SEQ ID NO: 404 - protein, 107 aa, Artificial Sequence
  Description of Artificial Sequence: Synthetic polypeptide
DIVMTQTPSSLSASVGDRVTITCRASQSISSYLNWYQQKPGKAPKLLIYAASSLQSGVPSRFSGSGSGTDFTLTISSLQPEDFATYYCQQSYSTPYSFGQGTRLEIK

SEQ ID NO: 405 - protein, 109 aa, Artificial Sequence
  Description of Artificial Sequence: Synthetic polypeptide
EIVLTQSPGTLSLSPGERATLSCRATQSIGSSFLAWYQQRPGQAPRLLIYGASQRATGIPDRFSGRGSGTDFTLTISRVEPEDSAVYYCQHYESSPSWTFGQGTKVEIK

SEQ ID NO: 406 - protein, 109 aa, Artificial Sequence
  Description of Artificial Sequence: Synthetic polypeptide
EIVLTQSPATLSLSPGERATLSCRASQSVSSSYLAWYQQKPGQAPRLLIYGASSRATGIPDRFSGNGSGTDFTLTISRLEPEDFAVYYCQQYGSPPRFTFGPGTKVDIK

SEQ ID NO: 407 - protein, 109 aa, Artificial Sequence
  Description of Artificial Sequence: Synthetic polypeptide
EIVLTQSPGTLSLSPGERATLSCRASQSVSSSYLAWYQQRPGQAPRLLIYGASSRATGIPDRFSGSGSGTDFTLTISRLEPEDFAVYYCQHYGSSPSWTFGQGTRLEIK

SEQ ID NO: 408 - protein, 109 aa, Artificial Sequence
  Description of Artificial Sequence: Synthetic polypeptide
EIVMTQSPGTLSLSPGESATLSCRASQRVASNYLAWYQHKPGQAPSLLISGASSRATGVPDRFSGSGSGTDFTLAISRLEPEDSAVYYCQHYDSSPSWTFGQGTKVEIK

SEQ ID NO: 409 - protein, 109 aa, Artificial Sequence
  Description of Artificial Sequence: Synthetic polypeptide
EIVLTQSPGTLSLSPGERATLSCRASQSLSSNFLAWYQQKPGQAPGLLIYGASNWATGTPDRFSGSGSGTDFTLTITRLEPEDFAVYYCQYYGTSPMYTFGQGTKVEIK

SEQ ID NO: 410 - protein, 112 aa, Artificial Sequence
  Description of Artificial Sequence: Synthetic polypeptide
DIVLTQSPLSLPVTPGEPASISCRSSQSLLHSNGYNYLDWYLQKPGQSPQLLIYLGSNRASGVPDRFSGSGSGTDFTLKISRVEAEDVGVYYCMQALQTPLTFGGGTKVDIK

SEQ ID NO: 411 - protein, 110 aa, Artificial Sequence
  Description of Artificial Sequence: Synthetic polypeptide
EIVLTQSPGTLSLSPGERATLSCRASQSVSSSYLAWYQQKPGQAPRLLIYGTSSRATGISDRFSGSGSGTDFTLTISRLEPEDFAVYYCQHYGNSPPKFTFGPGTKLEIK

SEQ ID NO: 412 - protein, 109 aa, Artificial Sequence
  Description of Artificial Sequence: Synthetic polypeptide
EIVLTQSPGTLSLSPGERATLSCRASQSVASSFLAWYQQKPGQAPRLLIYGASGRATGIPDRFSGSGSGTDFTLTISRLEPEDFAVYYCQHYGGSPRLTFGGGTKVDIK

SEQ ID NO: 413-454 - skipped (42 entries)

SEQ ID NO: 455 - protein, 122 aa, Artificial Sequence
  Description of Artificial Sequence: Synthetic polypeptide
QIQLVQSGPDLKKPGETVKLSCKASGYTFTNFGMNWVKQAPGKGFKWMAWINTYTGESYFADDFKGRFAFSVETSATTAYLQINNLKTEDTATYFCARGEIYYGYDGGFAYWGQGTLVTVSA

SEQ ID NO: 456 - protein, 117 aa, Artificial Sequence
  Description of Artificial Sequence: Synthetic polypeptide
QIQLVQSGPELKKPGETVKISCKASGYTFTDYSINWVKRAPGKGLKWMGWINTETREPAYAYDFRGRFAFSLETSASTAYLQINNLKYEDTATYFCALDYSYAMDYWGQGTSVTVSS

SEQ ID NO: 457 - protein, 117 aa, Artificial Sequence
  Description of Artificial Sequence: Synthetic polypeptide
QIQLVQSGPELKKPGETVKISCKASGYTFRHYSMNWVKQAPGKGLKWMGRINTESGVPIYADDFKGRFAFSVETSASTAYLVINNLKDEDTASYFCSNDYLYSLDFWGQGTALTVSS

SEQ ID NO: 458 - protein, 117 aa, Artificial Sequence
  Description of Artificial Sequence: Synthetic polypeptide
QIQLVQSGPELKKPGETVKISCKASGYTFTHYSMNWVKQAPGKGLKWMGRINTETGEPLYADDFKGRFAFSLETSASTAYLVINNLKNEDTATFFCSNDYLYSCDYWGQGTTLTVSS

SEQ ID NO: 459 - protein, 107 aa, Artificial Sequence
  Description of Artificial Sequence: Synthetic polypeptide
DVVMTQSHRFMSTSVGDRVSITCRASQDVNTAVSWYQQKPGQSPKLLIFSASYRYTGVPDRFTGSGSGADFTLTISSVQAEDLAVYYCQQHYSTPWTFGGGTKLDIK

SEQ ID NO: 460 - protein, 111 aa, Artificial Sequence
  Description of Artificial Sequence: Synthetic polypeptide
DIVLTQSPASLAMSLGKRATISCRASESVSVIGAHLIHWYQQKPGQPPKLLIYLASNLETGVPARFSGSGSGTDFTLTIDPVEEDDVAIYSCLQSRIFPRTFGGGTKLEIK

SEQ ID NO: 461 - protein, 111 aa, Artificial Sequence
  Description of Artificial Sequence: Synthetic polypeptide
DIVLTQSPPSLAMSLGKRATISCRASESVTILGSHLIYWYQQKPGQPPTLLIQLASNVQTGVPARFSGSGSRTDFTLTIDPVEEDDVAVYYCLQSRTIPRTFGGGTKLEIK

SEQ ID NO: 462 - protein, 111 aa, Artificial Sequence; identical to SEQ ID NO: 461
  Description of Artificial Sequence: Synthetic polypeptide

SEQ ID NO: 463 - protein, 244 aa, Artificial Sequence
  Description of Artificial Sequence: Synthetic polypeptide
QIQLVQSGPDLKKPGETVKLSCKASGYTFTNFGMNWVKQAPGKGFKWMAWINTYTGESYFADDFKGRFAFSVETSATTAYLQINNLKTEDTATYFCARGEIYYGYDGGFAYWGQGTLVTVSAGGGGSGGGGSGGGGSDVVMTQSHRFMSTSVGDRVSITCRASQDVNTAVSWYQQKPGQSPKLLIFSASYRYTGVPDRFTGSGSGADFTLTISSVQAEDLAVYYCQQHYSTPWTFGGGTKLDIK

SEQ ID NO: 464 - protein, 249 aa, Artificial Sequence
  Description of Artificial Sequence: Synthetic polypeptide
QIQLVQSGPELKKPGETVKISCKASGYTFTDYSINWVKRAPGKGLKWMGWINTETREPAYAYDFRGRFAFSLETSASTAYLQINNLKYEDTATYFCALDYSYAMDYWGQGTSVTVSSGGGGSGGGGSGGGGSQIQLVQSGPELKKPGETVKISCKASGYTFTDYSINWVKRAPGKGLKWMGWINTETREPAYAYDFRGRFAFSLETSASTAYLQINNLKYEDTATYFCALDYSYAMDYWGQGTSVTVSS

SEQ ID NO: 465 - protein, 243 aa, Artificial Sequence
  Description of Artificial Sequence: Synthetic polypeptide
QIQLVQSGPELKKPGETVKISCKASGYTFRHYSMNWVKQAPGKGLKWMGRINTESGVPIYADDFKGRFAFSVETSASTAYLVINNLKDEDTASYFCSNDYLYSLDFWGQGTALTVSSGGGGSGGGGSGGGGSDIVLTQSPPSLAMSLGKRATISCRASESVTILGSHLIYWYQQKPGQPPTLLIQLASNVQTGVPARFSGSGSRTDFTLTIDPVEEDDVAVYYCLQSRTIPRTFGGGTKLEIK

SEQ ID NO: 466 - protein, 243 aa, Artificial Sequence
  Description of Artificial Sequence: Synthetic polypeptide
QIQLVQSGPELKKPGETVKISCKASGYTFTHYSMNWVKQAPGKGLKWMGRINTETGEPLYADDFKGRFAFSLETSASTAYLVINNLKNEDTATFFCSNDYLYSCDYWGQGTTLTVSSGGGGSGGGGSGGGGSDIVLTQSPPSLAMSLGKRATISCRASESVTILGSHLIYWYQQKPGQPPTLLIQLASNVQTGVPARFSGSGSRTDFTLTIDPVEEDDVAVYYCLQSRTIPRTFGGGTKLEIK

SEQ ID NO: 467-583 - skipped (117 entries)

SEQ ID NO: 584 - protein, 5 aa, Artificial Sequence
  Description of Artificial Sequence: Synthetic peptide
NYAMS

SEQ ID NO: 585 - protein, 5 aa, Artificial Sequence
  Description of Artificial Sequence: Synthetic peptide
DYAMH

SEQ ID NO: 586 - protein, 5 aa, Artificial Sequence
  Description of Artificial Sequence: Synthetic peptide
NHGMS

SEQ ID NO: 587 - protein, 5 aa, Artificial Sequence
  Description of Artificial Sequence: Synthetic peptide
NFGIN

SEQ ID NO: 588 - protein, 5 aa, Artificial Sequence
  Description of Artificial Sequence: Synthetic peptide
SDAMT

SEQ ID NO: 589 - protein, 5 aa, Artificial Sequence
  Description of Artificial Sequence: Synthetic peptide
NYGIT

SEQ ID NO: 590 - protein, 5 aa, Artificial Sequence
  Description of Artificial Sequence: Synthetic peptide
NHGMS

SEQ ID NO: 591 - protein, 5 aa, Artificial Sequence
  Description of Artificial Sequence: Synthetic peptide
NHGMS

SEQ ID NO: 592 - protein, 5 aa, Artificial Sequence
  Description of Artificial Sequence: Synthetic peptide
NHGMS

SEQ ID NO: 593 - protein, 5 aa, Artificial Sequence
  Description of Artificial Sequence: Synthetic peptide
DYYMS

SEQ ID NO: 594 - protein, 5 aa, Artificial Sequence
  Description of Artificial Sequence: Synthetic peptide
NHGMS

SEQ ID NO: 595 - protein, 5 aa, Artificial Sequence
  Description of Artificial Sequence: Synthetic peptide
DYYMS

SEQ ID NO: 596 - protein, 5 aa, Artificial Sequence
  Description of Artificial Sequence: Synthetic peptide
NHGMS

SEQ ID NO: 597 - protein, 5 aa, Artificial Sequence
  Description of Artificial Sequence: Synthetic peptide
NHGMS

SEQ ID NO: 598 - protein, 5 aa, Artificial Sequence
  Description of Artificial Sequence: Synthetic peptide
NHGMS

SEQ ID NO: 599 - protein, 7 aa, Artificial Sequence
  Description of Artificial Sequence: Synthetic peptide
SSYYYWG

SEQ ID NO: 600 - protein, 7 aa, Artificial Sequence
  Description of Artificial Sequence: Synthetic peptide
TSGMCVS

SEQ ID NO: 601 - protein, 5 aa, Artificial Sequence
  Description of Artificial Sequence: Synthetic peptide
SYSMN

SEQ ID NO: 602 - protein, 5 aa, Artificial Sequence
  Description of Artificial Sequence: Synthetic peptide
DYYMS

SEQ ID NO: 603 - protein, 5 aa, Artificial Sequence
  Description of Artificial Sequence: Synthetic peptide
SHYIH

SEQ ID NO: 604 - protein, 7 aa, Artificial Sequence
  Description of Artificial Sequence: Synthetic peptide
SGGYYWS

SEQ ID NO: 605 - protein, 5 aa, Artificial Sequence
  Description of Artificial Sequence: Synthetic peptide
SYAIS

SEQ ID NO: 606 - protein, 7 aa, Artificial Sequence
  Description of Artificial Sequence: Synthetic peptide
SNSAAWN

SEQ ID NO: 607 - protein, 5 aa, Artificial Sequence
  Description of Artificial Sequence: Synthetic peptide
SYAMS

SEQ ID NO: 608 - protein, 5 aa, Artificial Sequence
  Description of Artificial Sequence: Synthetic peptide
RYPMS

SEQ ID NO: 609 - protein, 5 aa, Artificial Sequence
  Description of Artificial Sequence: Synthetic peptide
SYAMS

SEQ ID NO: 610 - protein, 5 aa, Artificial Sequence
  Description of Artificial Sequence: Synthetic peptide
SYAMS

SEQ ID NO: 611 - protein, 5 aa, Artificial Sequence
  Description of Artificial Sequence: Synthetic peptide
DYAMH

SEQ ID NO: 612 - protein, 5 aa, Artificial Sequence
  Description of Artificial Sequence: Synthetic peptide
DYAMH

SEQ ID NO: 613 - protein, 5 aa, Artificial Sequence
  Description of Artificial Sequence: Synthetic peptide
SYAMS

SEQ ID NO: 614 - protein, 5 aa, Artificial Sequence
  Description of Artificial Sequence: Synthetic peptide
SYAMS

SEQ ID NO: 615 - protein, 5 aa, Artificial Sequence
  Description of Artificial Sequence: Synthetic peptide
SYAMS

SEQ ID NO: 616 - protein, 5 aa, Artificial Sequence
  Description of Artificial Sequence: Synthetic peptide
SYAMS

SEQ ID NO: 617 - protein, 5 aa, Artificial Sequence
  Description of Artificial Sequence: Synthetic peptide
SYAMS

SEQ ID NO: 618 - protein, 5 aa, Artificial Sequence
  Description of Artificial Sequence: Synthetic peptide
SYAMS

SEQ ID NO: 619 - protein, 5 aa, Artificial Sequence
  Description of Artificial Sequence: Synthetic peptide
SYAMS

SEQ ID NO: 620 - protein, 5 aa, Artificial Sequence
  Description of Artificial Sequence: Synthetic peptide
NFGMN

SEQ ID NO: 621 - protein, 5 aa, Artificial Sequence
  Description of Artificial Sequence: Synthetic peptide
DYSIN

SEQ ID NO: 622 - protein, 5 aa, Artificial Sequence
  Description of Artificial Sequence: Synthetic peptide
HYSMN

SEQ ID NO: 623 - protein, 5 aa, Artificial Sequence
  Description of Artificial Sequence: Synthetic peptide
HYSMN

SEQ ID NO: 624 - protein, 17 aa, Artificial Sequence
  Description of Artificial Sequence: Synthetic peptide
GISRSGENTYYADSVKG

SEQ ID NO: 625 - protein, 17 aa, Artificial Sequence
  Description of Artificial Sequence: Synthetic peptide
GISWNSGSIGYADSVKG

SEQ ID NO: 626 - protein, 16 aa, Artificial Sequence
  Description of Artificial Sequence: Synthetic peptide
GIVYSGSTYYAASVKG

SEQ ID NO: 627 - protein, 17 aa, Artificial Sequence
  Description of Artificial Sequence: Synthetic peptide
WINPKNNNTNYAQKFQG

SEQ ID NO: 628 - protein, 17 aa, Artificial Sequence
  Description of Artificial Sequence: Synthetic peptide
VISGSGGTTYYADSVKG

SEQ ID NO: 629 - protein, 17 aa, Artificial Sequence
  Description of Artificial Sequence: Synthetic peptide
WISAYNGNTNYAQKFQG

SEQ ID NO: 630 - protein, 16 aa, Artificial Sequence
  Description of Artificial Sequence: Synthetic peptide
GIVYSGSTYYAASVKG

SEQ ID NO: 631 - protein, 16 aa, Artificial Sequence
  Description of Artificial Sequence: Synthetic peptide
GIVYSGSTYYAASVKG

SEQ ID NO: 632 - protein, 16 aa, Artificial Sequence
  Description of Artificial Sequence: Synthetic peptide
GIVYSGSTYYAASVKG

SEQ ID NO: 633 - protein, 17 aa, Artificial Sequence
  Description of Artificial Sequence: Synthetic peptide
YISSSGSTIYYADSVKG

SEQ ID NO: 634 - protein, 16 aa, Artificial Sequence
  Description of Artificial Sequence: Synthetic peptide
GIVYSGSTYYAASVKG

SEQ ID NO: 635 - protein, 17 aa, Artificial Sequence
  Description of Artificial Sequence: Synthetic peptide
YISSSGNTIYYADSVKG

SEQ ID NO: 636 - protein, 16 aa, Artificial Sequence
  Description of Artificial Sequence: Synthetic peptide
GIVYSGSTYYAASVKG

SEQ ID NO: 637 - protein, 16 aa, Artificial Sequence
  Description of Artificial Sequence: Synthetic peptide
GIVYSGSTYYAASVKG

SEQ ID NO: 638 - protein, 16 aa, Artificial Sequence
  Description of Artificial Sequence: Synthetic peptide
GIVYSGSTYYAASVKG

SEQ ID NO: 639 - protein, 16 aa, Artificial Sequence
  Description of Artificial Sequence: Synthetic peptide
SIYYSGSAYYNPSLKS

SEQ ID NO: 640 - protein, 16 aa, Artificial Sequence
  Description of Artificial Sequence: Synthetic peptide
RIDWDEDKFYSTSLKT

SEQ ID NO: 641 - protein, 17 aa, Artificial Sequence
  Description of Artificial Sequence: Synthetic peptide
SISSSSSYIYYADSVKG

SEQ ID NO: 642 - protein, 17 aa, Artificial Sequence
  Description of Artificial Sequence: Synthetic peptide
YISSSGSTIYYADSVKG

SEQ ID NO: 643 - protein, 17 aa, Artificial Sequence
  Description of Artificial Sequence: Synthetic peptide
MINPSGGVTAYSQTLQG

SEQ ID NO: 644 - protein, 16 aa, Artificial Sequence
  Description of Artificial Sequence: Synthetic peptide
YIYYSGSTYYNPSLKS

SEQ ID NO: 645 - protein, 17 aa, Artificial Sequence
  Description of Artificial Sequence: Synthetic peptide
GIIPIFGTANYAQKFQG

SEQ ID NO: 646 - protein, 18 aa, Artificial Sequence
  Description of Artificial Sequence: Synthetic peptide
RTYYRSKWYSFYAISLKS

SEQ ID NO: 647 - protein, 17 aa, Artificial Sequence
  Description of Artificial Sequence: Synthetic peptide
AISGSGGSTYYADSVKG

SEQ ID NO: 648 - protein, 17 aa, Artificial Sequence
  Description of Artificial Sequence: Synthetic peptide
GISDSGVSTYYADSAKG

SEQ ID NO: 649 - protein, 17 aa, Artificial Sequence
  Description of Artificial Sequence: Synthetic peptide
AISGSGGSTYYADSVKG

SEQ ID NO: 650 - protein, 17 aa, Artificial Sequence
  Description of Artificial Sequence: Synthetic peptide
AISGSGGSTYYADSVKG

SEQ ID NO: 651 - protein, 17 aa, Artificial Sequence
  Description of Artificial Sequence: Synthetic peptide
GISWNSGSIGYADSVKG

SEQ ID NO: 652 - protein, 17 aa, Artificial Sequence
  Description of Artificial Sequence: Synthetic peptide
SINWKGNSLAYGDSVKG

SEQ ID NO: 653 - protein, 17 aa, Artificial Sequence
  Description of Artificial Sequence: Synthetic peptide
AISGSGGSTYYADSVKG

SEQ ID NO: 654 - protein, 17 aa, Artificial Sequence
  Description of Artificial Sequence: Synthetic peptide
AISGSGGSTYYADSVKG

SEQ ID NO: 655 - protein, 17 aa, Artificial Sequence
  Description of Artificial Sequence: Synthetic peptide
AISGSGGSTYYADSVKG

SEQ ID NO: 656 - protein, 17 aa, Artificial Sequence
  Description of Artificial Sequence: Synthetic peptide
AISGSGGSTYYADSVKG

SEQ ID NO: 657 - protein, 17 aa, Artificial Sequence
  Description of Artificial Sequence: Synthetic peptide
AISGSGGSTYYADSVKG

SEQ ID NO: 658 - protein, 17 aa, Artificial Sequence
  Description of Artificial Sequence: Synthetic peptide
AISGSGGSTYYADSVKG

SEQ ID NO: 659 - protein, 17 aa, Artificial Sequence
  Description of Artificial Sequence: Synthetic peptide
AISGSGGSTYYADSVKG

SEQ ID NO: 660 - protein, 17 aa, Artificial Sequence
  Description of Artificial Sequence: Synthetic peptide
WINTYTGESYFADDFKG

SEQ ID NO: 661 - protein, 17 aa, Artificial Sequence
  Description of Artificial Sequence: Synthetic peptide
WINTETREPAYAYDFRG

SEQ ID NO: 662 - protein, 17 aa, Artificial Sequence
  Description of Artificial Sequence: Synthetic peptide
RINTESGVPIYADDFKG

SEQ ID NO: 663 - protein, 17 aa, Artificial Sequence
  Description of Artificial Sequence: Synthetic peptide
RINTETGEPLYADDFKG

SEQ ID NO: 664 - protein, 11 aa, Artificial Sequence
  Description of Artificial Sequence: Synthetic peptide
SPAHYYGGMDV

SEQ ID NO: 665 - protein, 6 aa, Artificial Sequence
  Description of Artificial Sequence: Synthetic peptide
HSFLAY

SEQ ID NO: 666 - protein, 7 aa, Artificial Sequence
  Description of Artificial Sequence: Synthetic peptide
HGGESDV

SEQ ID NO: 667 - protein, 11 aa, Artificial Sequence
  Description of Artificial Sequence: Synthetic peptide
GPYYYQSYMDV

SEQ ID NO: 668 - protein, 14 aa, Artificial Sequence
  Description of Artificial Sequence: Synthetic peptide
LDSSGYYYARGPRY

SEQ ID NO: 669 - protein, 9 aa, Artificial Sequence
  Description of Artificial Sequence: Synthetic peptide
GPYYYYMDV

SEQ ID NO: 670 - protein, 7 aa, Artificial Sequence
  Description of Artificial Sequence: Synthetic peptide
HGGESDV

SEQ ID NO: 671 - protein, 7 aa, Artificial Sequence
  Description of Artificial Sequence: Synthetic peptide
HGGESDV

SEQ ID NO: 672 - protein, 7 aa, Artificial Sequence
  Description of Artificial Sequence: Synthetic peptide
HGGESDV

SEQ ID NO: 673 - protein, 8 aa, Artificial Sequence
  Description of Artificial Sequence: Synthetic peptide
ESGDGMDV

SEQ ID NO: 674 - protein, 7 aa, Artificial Sequence
  Description of Artificial Sequence: Synthetic peptide
HGGESDV

SEQ ID NO: 675 - protein, 8 aa, Artificial Sequence
  Description of Artificial Sequence: Synthetic peptide
STMVREDY

SEQ ID NO: 676 - protein, 7 aa, Artificial Sequence
  Description of Artificial Sequence: Synthetic peptide
HGGESDV

SEQ ID NO: 677 - protein, 7 aa, Artificial Sequence
  Description of Artificial Sequence: Synthetic peptide
HGGESDV

SEQ ID NO: 678 - protein, 7 aa, Artificial Sequence
  Description of Artificial Sequence: Synthetic peptide
HGGESDV

SEQ ID NO: 679 - protein, 11 aa, Artificial Sequence
  Description of Artificial Sequence: Synthetic peptide
HWQEWPDAFDI

SEQ ID NO: 680 - protein, 13 aa, Artificial Sequence
  Description of Artificial Sequence: Synthetic peptide
SGAGGTSATAFDI

SEQ ID NO: 681 - protein, 10 aa, Artificial Sequence
  Description of Artificial Sequence: Synthetic peptide
TIAAVYAFDI

SEQ ID NO: 682 - protein, 8 aa, Artificial Sequence
  Description of Artificial Sequence: Synthetic peptide
DLRGAFDI

SEQ ID NO: 683 - protein, 11 aa, Artificial Sequence
  Description of Artificial Sequence: Synthetic peptide
EGSGSGWYFDF

SEQ ID NO: 684 - protein, 13 aa, Artificial Sequence
  Description of Artificial Sequence: Synthetic peptide
AGIAARLRGAFDI

SEQ ID NO: 685 - protein, 20 aa, Artificial Sequence
  Description of Artificial Sequence: Synthetic peptide
RGGYQLLRWDVGLLRSAFDI

SEQ ID NO: 686 - protein, 13 aa, Artificial Sequence
  Description of Artificial Sequence: Synthetic peptide
SSPEGLFLYWFDP

SEQ ID NO: 687 - protein, 9 aa, Artificial Sequence
  Description of Artificial Sequence: Synthetic peptide
VEGSGSLDY

SEQ ID NO: 688 - protein, 9 aa, Artificial Sequence
  Description of Artificial Sequence: Synthetic peptide
RAGSEASDI

SEQ ID NO: 689 - protein, 15 aa, Artificial Sequence
  Description of Artificial Sequence: Synthetic peptide
ATYKRELRYYYGMDV

SEQ ID NO: 690 - protein, 15 aa, Artificial Sequence
  Description of Artificial Sequence: Synthetic peptide
ATYKRELRYYYGMDV

SEQ ID NO: 691 - protein, 8 aa, Artificial Sequence
  Description of Artificial Sequence: Synthetic peptide
VGKAVPDV

SEQ ID NO: 692 - protein, 13 aa, Artificial Sequence
  Description of Artificial Sequence: Synthetic peptide
HQGVAYYNYAMDV

SEQ ID NO: 693 - protein, 8 aa, Artificial Sequence
  Description of Artificial Sequence: Synthetic peptide
VVRDGMDV

SEQ ID NO: 694 - protein, 9 aa, Artificial Sequence
  Description of Artificial Sequence: Synthetic peptide
IPQTGTFDY

SEQ ID NO: 695 - protein, 15 aa, Artificial Sequence
  Description of Artificial Sequence: Synthetic peptide
ANYKRELRYYYGMDV

SEQ ID NO: 696 - protein, 11 aa, Artificial Sequence
  Description of Artificial Sequence: Synthetic peptide
ALVGATGAFDI

SEQ ID NO: 697 - protein, 8 aa, Artificial Sequence
  Description of Artificial Sequence: Synthetic peptide
WFGEGFDP

SEQ ID NO: 698 - protein, 17 aa, Artificial Sequence
  Description of Artificial Sequence: Synthetic peptide
VGYDSSGYYRDYYGMDV

SEQ ID NO: 699 - protein, 13 aa, Artificial Sequence
  Description of Artificial Sequence: Synthetic peptide
MGWSSGYLGAFDI

SEQ ID NO: 700 - protein, 13 aa, Artificial Sequence
  Description of Artificial Sequence: Synthetic peptide
GEIYYGYDGGFAY

SEQ ID NO: 701 - protein, 8 aa, Artificial Sequence
  Description of Artificial Sequence: Synthetic peptide
DYSYAMDY

SEQ ID NO: 702 - protein, 8 aa, Artificial Sequence
  Description of Artificial Sequence: Synthetic peptide
DYLYSLDF

SEQ ID NO: 703 - protein, 8 aa, Artificial Sequence
  Description of Artificial Sequence: Synthetic peptide
DYLYSCDY

SEQ ID NO: 704 - protein, 12 aa, Artificial Sequence
  Description of Artificial Sequence: Synthetic peptide
RASQSISSSFLA

SEQ ID NO: 705 - protein, 16 aa, Artificial Sequence
  Description of Artificial Sequence: Synthetic peptide
RSSQSLLHSNGYNYLD

SEQ ID NO: 706 - protein, 16 aa, Artificial Sequence
  Description of Artificial Sequence: Synthetic peptide
KSSQSLLRNDGKTPLY

SEQ ID NO: 707 - protein, 16 aa, Artificial Sequence
  Description of Artificial Sequence: Synthetic peptide
RSSQSLLHSNGYNYLN

SEQ ID NO: 708 - protein, 11 aa, Artificial Sequence
  Description of Artificial Sequence: Synthetic peptide
RASQSISSYLN

SEQ ID NO: 709 - protein, 16 aa, Artificial Sequence
  Description of Artificial Sequence: Synthetic peptide
RSSQSLLYSNGYNYVD

SEQ ID NO: 710 - protein, 11 aa, Artificial Sequence
  Description of Artificial Sequence: Synthetic peptide
RASQSVSSNLA

SEQ ID NO: 711 - protein, 11 aa, Artificial Sequence
  Description of Artificial Sequence: Synthetic peptide
RASQSVSSKLA

SEQ ID NO: 712 - protein, 12 aa, Artificial Sequence
  Description of Artificial Sequence: Synthetic peptide
RASQSVGSTNLA

SEQ ID NO: 713 - protein, 11 aa, Artificial Sequence
  Description of Artificial Sequence: Synthetic peptide
RASQSISSYLN

SEQ ID NO: 714 - protein, 11 aa, Artificial Sequence
  Description of Artificial Sequence: Synthetic peptide
RASQSISSYLN

SEQ ID NO: 715 - protein, 16 aa, Artificial Sequence
  Description of Artificial Sequence: Synthetic peptide
KSSESLVHNSGKTYLN

SEQ ID NO: 716 - protein, 11 aa, Artificial Sequence
  Description of Artificial Sequence: Synthetic peptide
QASEDINKFLN

SEQ ID NO: 717 - protein, 11 aa, Artificial Sequence
  Description of Artificial Sequence: Synthetic peptide
RASQSVGSNLA

SEQ ID NO: 718 - protein, 12 aa, Artificial Sequence
  Description of Artificial Sequence: Synthetic peptide
RASQSIGSSSLA

SEQ ID NO: 719 - protein, 11 aa, Artificial Sequence
  Description of Artificial Sequence: Synthetic peptide
KASQDIDDAMN

SEQ ID NO: 720 - protein, 11 aa, Artificial Sequence
  Description of Artificial Sequence: Synthetic peptide
RASQDIYNNLA

SEQ ID NO: 721 - protein, 16 aa, Artificial Sequence
  Description of Artificial Sequence: Synthetic peptide
RSSQSLLHSNGYNYLD

SEQ ID NO: 722 - protein, 11 aa, Artificial Sequence
  Description of Artificial Sequence: Synthetic peptide
GGNNIGTKSVH

SEQ ID NO: 723 - protein, 11 aa, Artificial Sequence
  Description of Artificial Sequence: Synthetic peptide
SGDGLSKKYVS

SEQ ID NO: 724 - protein, 11 aa, Artificial Sequence
  Description of Artificial Sequence: Synthetic peptide
RASQGIRNWLA

SEQ ID NO: 725 - protein, 11 aa, Artificial Sequence
  Description of Artificial Sequence: Synthetic peptide
GGNNIGSKSVH

SEQ ID NO: 726 - protein, 11 aa, Artificial Sequence
  Description of Artificial Sequence: Synthetic peptide
QGDSLGNYYAT

SEQ ID NO: 727 - protein, 12 aa, Artificial Sequence
  Description of Artificial Sequence: Synthetic peptide
RASQSVSSAYLA

SEQ ID NO: 728 - protein, 11 aa, Artificial Sequence
  Description of Artificial Sequence: Synthetic peptide
RASQSVSNSLA

SEQ ID NO: 729 - protein, 12 aa, Artificial Sequence
  Description of Artificial Sequence: Synthetic peptide
RASQSVSSSFLA

SEQ ID NO: 730 - protein, 12 aa, Artificial Sequence
  Description of Artificial Sequence: Synthetic peptide
RASQSVSTTFLA

SEQ ID NO: 731 - protein, 11 aa, Artificial Sequence
  Description of Artificial Sequence: Synthetic peptide
RASQSISSYLN

SEQ ID NO: 732 - protein, 12 aa, Artificial Sequence
  Description of Artificial Sequence: Synthetic peptide
RATQSIGSSFLA

SEQ ID NO: 733 - protein, 12 aa, Artificial Sequence
  Description of Artificial Sequence: Synthetic peptide
RASQSVSSSYLA

SEQ ID NO: 734 - protein, 12 aa, Artificial Sequence
  Description of Artificial Sequence: Synthetic peptide
RASQSVSSSYLA

SEQ ID NO: 735 - protein, 12 aa, Artificial Sequence
  Description of Artificial Sequence: Synthetic peptide
RASQRVASNYLA

SEQ ID NO: 736 - protein, 12 aa, Artificial Sequence
  Description of Artificial Sequence: Synthetic peptide
RASQSLSSNFLA

SEQ ID NO: 737 - protein, 16 aa, Artificial Sequence
  Description of Artificial Sequence: Synthetic peptide
RSSQSLLHSNGYNYLD

SEQ ID NO: 738 - protein, 12 aa, Artificial Sequence
  Description of Artificial Sequence: Synthetic peptide
RASQSVSSSYLA

SEQ ID NO: 739 - protein, 12 aa, Artificial Sequence
  Description of Artificial Sequence: Synthetic peptide
RASQSVASSFLA

SEQ ID NO: 740 - protein, 11 aa, Artificial Sequence
  Description of Artificial Sequence: Synthetic peptide
RASQDVNTAVS

SEQ ID NO: 741 - protein, 15 aa, Artificial Sequence
  Description of Artificial Sequence: Synthetic peptide
RASESVSVIGAHLIH

SEQ ID NO: 742 - protein, 15 aa, Artificial Sequence
  Description of Artificial Sequence: Synthetic peptide
RASESVTILGSHLIY

SEQ ID NO: 743 - protein, 15 aa, Artificial Sequence
  Description of Artificial Sequence: Synthetic peptide
RASESVTILGSHLIY

SEQ ID NO: 744 - protein, 7 aa, Artificial Sequence
  Description of Artificial Sequence: Synthetic peptide
GASRRAT

SEQ ID NO: 745 - protein, 7 aa, Artificial Sequence
  Description of Artificial Sequence: Synthetic peptide
LGSNRAS

SEQ ID NO: 746 - protein, 7 aa, Artificial Sequence
  Description of Artificial Sequence: Synthetic peptide
EVSNRFS

SEQ ID NO: 747 - protein, 7 aa, Artificial Sequence
  Description of Artificial Sequence: Synthetic peptide
LGSKRAS

SEQ ID NO: 748 - protein, 7 aa, Artificial Sequence
  Description of Artificial Sequence: Synthetic peptide
GASTLAS

SEQ ID NO: 749 - protein, 7 aa, Artificial Sequence
  Description of Artificial Sequence: Synthetic peptide
LGSNRAS

SEQ ID NO: 750 - protein, 7 aa, Artificial Sequence
  Description of Artificial Sequence: Synthetic peptide
GASTRAS

SEQ ID NO: 751 - protein, 7 aa, Artificial Sequence
  Description of Artificial Sequence: Synthetic peptide
GASIRAT

SEQ ID NO: 752 - protein, 7 aa, Artificial Sequence
  Description of Artificial Sequence: Synthetic peptide
DASNRAT

SEQ ID NO: 753 - protein, 7 aa, Artificial Sequence
  Description of Artificial Sequence: Synthetic peptide
AASSLQS

SEQ ID NO: 754 - protein, 7 aa, Artificial Sequence
  Description of Artificial Sequence: Synthetic peptide
AASSLQS

SEQ ID NO: 755 - protein, 7 aa, Artificial Sequence
  Description of Artificial Sequence: Synthetic peptide
EVSNRDS

SEQ ID NO: 756 - protein, 7 aa, Artificial Sequence
  Description of Artificial Sequence: Synthetic peptide
DASTLQT

SEQ ID NO: 757 - protein, 7 aa, Artificial Sequence
  Description of Artificial Sequence: Synthetic peptide
GASTRAT

SEQ ID NO: 758 - protein, 7 aa, Artificial Sequence
  Description of Artificial Sequence: Synthetic peptide
GASSRAS

SEQ ID NO: 759 - protein, 7 aa, Artificial Sequence
  Description of Artificial Sequence: Synthetic peptide
SATSPVP

SEQ ID NO: 760 - protein, 7 aa, Artificial Sequence
  Description of Artificial Sequence: Synthetic peptide
AANKSQS

SEQ ID NO: 761 - protein, 7 aa, Artificial Sequence
  Description of Artificial Sequence: Synthetic peptide
LGSNRAS

SEQ ID NO: 762 - protein, 7 aa, Artificial Sequence
  Description of Artificial Sequence: Synthetic peptide
DDSVRPS

SEQ ID NO: 763 - protein, 7 aa, Artificial Sequence
  Description of Artificial Sequence: Synthetic peptide
RDKERPS

SEQ ID NO: 764 - protein, 7 aa, Artificial Sequence
  Description of Artificial Sequence: Synthetic peptide
AASNLQS

SEQ ID NO: 765 - protein, 7 aa, Artificial Sequence
  Description of Artificial Sequence: Synthetic peptide
GKNNRPS

SEQ ID NO: 766 - protein, 7 aa, Artificial Sequence
  Description of Artificial Sequence: Synthetic peptide
GTNNRPS

SEQ ID NO: 767 - protein, 7 aa, Artificial Sequence
  Description of Artificial Sequence: Synthetic peptide
GASTRAT

SEQ ID NO: 768 - protein, 7 aa, Artificial Sequence
  Description of Artificial Sequence: Synthetic peptide
DASSRAT

SEQ ID NO: 769 - protein, 7 aa, Artificial Sequence
  Description of Artificial Sequence: Synthetic peptide
GASSRAT

SEQ ID NO: 770 - protein, 7 aa, Artificial Sequence
  Description of Artificial Sequence: Synthetic peptide
GSSNRAT

SEQ ID NO: 771 - protein, 7 aa, Artificial Sequence
  Description of Artificial Sequence: Synthetic peptide
AASSLQS

SEQ ID NO: 772 - protein, 7 aa, Artificial Sequence
  Description of Artificial Sequence: Synthetic peptide
GASQRAT

SEQ ID NO: 773 - protein, 7 aa, Artificial Sequence
  Description of Artificial Sequence: Synthetic peptide
GASSRAT

SEQ ID NO: 774 - protein, 7 aa, Artificial Sequence
  Description of Artificial Sequence: Synthetic peptide
GASSRAT

SEQ ID NO: 775 - protein, 7 aa, Artificial Sequence
  Description of Artificial Sequence: Synthetic peptide
GASSRAT

SEQ ID NO: 776 - protein, 7 aa, Artificial Sequence
  Description of Artificial Sequence: Synthetic peptide
GASNWAT

SEQ ID NO: 777 - protein, 7 aa, Artificial Sequence
  Description of Artificial Sequence: Synthetic peptide
LGSNRAS

SEQ ID NO: 778 - protein, 7 aa, Artificial Sequence
  Description of Artificial Sequence: Synthetic peptide
GTSSRAT

SEQ ID NO: 779 - protein, 7 aa, Artificial Sequence
  Description of Artificial Sequence: Synthetic peptide
GASGRAT

SEQ ID NO: 780 - protein, 7 aa, Artificial Sequence
  Description of Artificial Sequence: Synthetic peptide
SASYRYT

SEQ ID NO: 781 - protein, 7 aa, Artificial Sequence
  Description of Artificial Sequence: Synthetic peptide
LASNLET

SEQ ID NO: 782 - protein, 7 aa, Artificial Sequence
  Description of Artificial Sequence: Synthetic peptide
LASNVQT

SEQ ID NO: 783 - protein, 7 aa, Artificial Sequence
  Description of Artificial Sequence: Synthetic peptide
LASNVQT

SEQ ID NO: 784 - protein, 10 aa, Artificial Sequence
  Description of Artificial Sequence: Synthetic peptide
QQYHSSPSWT

SEQ ID NO: 785 - protein, 9 aa, Artificial Sequence
  Description of Artificial Sequence: Synthetic peptide
MQALQTPYT

SEQ ID NO: 786 - protein, 8 aa, Artificial Sequence
  Description of Artificial Sequence: Synthetic peptide
MQNIQFPS

SEQ ID NO: 787 - protein, 9 aa, Artificial Sequence
  Description of Artificial Sequence: Synthetic peptide
MQALQTPYT

SEQ ID NO: 788 - protein, 8 aa, Artificial Sequence
  Description of Artificial Sequence: Synthetic peptide
QQSYKRAS

SEQ ID NO: 789 - protein, 9 aa, Artificial Sequence
  Description of Artificial Sequence: Synthetic peptide
MQGRQFPYS

SEQ ID NO: 790 - protein, 8 aa, Artificial Sequence
  Description of Artificial Sequence: Synthetic peptide
QQYGSSLT

SEQ ID NO: 791 - protein, 9 aa, Artificial Sequence
  Description of Artificial Sequence: Synthetic peptide
QQYGSSSWT

SEQ ID NO: 792 - protein, 10 aa, Artificial Sequence
  Description of Artificial Sequence: Synthetic peptide
QQYGSSPPWT

SEQ ID NO: 793 - protein, 7 aa, Artificial Sequence
  Description of Artificial Sequence: Synthetic peptide
QQSYTLA

SEQ ID NO: 794 - protein, 9 aa, Artificial Sequence
  Description of Artificial Sequence: Synthetic peptide
QQSYSTPYT

SEQ ID NO: 795 - protein, 9 aa, Artificial Sequence
  Description of Artificial Sequence: Synthetic peptide
MQGTHWPGT

SEQ ID NO: 796 - protein, 9 aa, Artificial Sequence
  Description of Artificial Sequence: Synthetic peptide
QQYESLPLT

SEQ ID NO: 797 - protein, 10 aa, Artificial Sequence
  Description of Artificial Sequence: Synthetic peptide
QQYNDWLPVT

SEQ ID NO: 798 - protein, 10 aa, Artificial Sequence
  Description of Artificial Sequence: Synthetic peptide
QQYAGSPPFT

SEQ ID NO: 799 - protein, 9 aa, Artificial Sequence
  Description of Artificial Sequence: Synthetic peptide
LQHDNFPLT

SEQ ID NO: 800 - protein, 9 aa, Artificial Sequence
  Description of Artificial Sequence: Synthetic peptide
QHYYRFPYS

SEQ ID NO: 801 - protein, 9 aa, Artificial Sequence
  Description of Artificial Sequence: Synthetic peptide
MQALQTPYT

SEQ ID NO: 802 - protein, 11 aa, Artificial Sequence
  Description of Artificial Sequence: Synthetic peptide
QVWDSDSEHVV

SEQ ID NO: 803 - protein, 9 aa, Artificial Sequence
  Description of Artificial Sequence: Synthetic peptide
QAWDDTTVV

SEQ ID NO: 804 - protein, 9 aa, Artificial Sequence
  Description of Artificial Sequence: Synthetic peptide
QKYNSAPFT

SEQ ID NO: 805 - protein, 12 aa, Artificial Sequence
  Description of Artificial Sequence: Synthetic peptide
SSRDSSGDHLRV

SEQ ID NO: 806 - protein, 11 aa, Artificial Sequence
  Description of Artificial Sequence: Synthetic peptide
NSRDSSGHHLL

SEQ ID NO: 807 - protein, 14 aa, Artificial Sequence
  Description of Artificial Sequence: Synthetic peptide
QHYGSSFNGSSLFT

SEQ ID NO: 808 - protein, 10 aa, Artificial Sequence
  Description of Artificial Sequence: Synthetic peptide
QQFGTSSGLT

SEQ ID NO: 809 - protein, 10 aa, Artificial Sequence
  Description of Artificial Sequence: Synthetic peptide
QQYHSSPSWT

SEQ ID NO: 810 - protein, 10 aa, Artificial Sequence
  Description of Artificial Sequence: Synthetic peptide
QQYHSSPSWT

SEQ ID NO: 811 - protein, 9 aa, Artificial Sequence
  Description of Artificial Sequence: Synthetic peptide
QQSYSTPYS

SEQ ID NO: 812 - protein, 10 aa, Artificial Sequence
  Description of Artificial Sequence: Synthetic peptide
QHYESSPSWT

SEQ ID NO: 813 - protein, 10 aa, Artificial Sequence
  Description of Artificial Sequence: Synthetic peptide
QQYGSPPRFT

SEQ ID NO: 814 - protein, 10 aa, Artificial Sequence
  Description of Artificial Sequence: Synthetic peptide
QHYGSSPSWT

SEQ ID NO: 815 - protein, 10 aa, Artificial Sequence
  Description of Artificial Sequence: Synthetic peptide
QHYDSSPSWT

SEQ ID NO: 816 - protein, 10 aa, Artificial Sequence
  Description of Artificial Sequence: Synthetic peptide
QYYGTSPMYT

SEQ ID NO: 817 - protein, 9 aa, Artificial Sequence
  Description of Artificial Sequence: Synthetic peptide
MQALQTPLT

SEQ ID NO: 818 - protein, 11 aa, Artificial Sequence
  Description of Artificial Sequence: Synthetic peptide
QHYGNSPPKFT

SEQ ID NO: 819 - protein, 10 aa, Artificial Sequence
  Description of Artificial Sequence: Synthetic peptide
QHYGGSPRLT

SEQ ID NO: 820 - protein, 9 aa, Artificial Sequence
  Description of Artificial Sequence: Synthetic peptide
QQHYSTPWT

SEQ ID NO: 821 - protein, 9 aa, Artificial Sequence
  Description of Artificial Sequence: Synthetic peptide
LQSRIFPRT

SEQ ID NO: 822 - protein, 9 aa, Artificial Sequence
  Description of Artificial Sequence: Synthetic peptide
LQSRTIPRT

SEQ ID NO: 823 - protein, 9 aa, Artificial Sequence
  Description of Artificial Sequence: Synthetic peptide
LQSRTIPRT

SEQ ID NO: 824-833 - skipped (10 entries)

SEQ ID NO: 834 - protein, 5 aa, Artificial Sequence
  Description of Artificial Sequence: Synthetic peptide
GGGGS

SEQ ID NO: 835-848 - skipped (14 entries)

SEQ ID NO: 849 - protein, 490 aa, Artificial Sequence
  Description of Artificial Sequence: Synthetic polypeptide
MALPVTALLLPLALLLHAARPQVQLVESGGGLVQPGRSLRLSCAASGFTFSNYAMSWVRQAPGKGLGWVSGISRSGENTYYADSVKGRFTISRDNSKNTLYLQMNSLRDEDTAVYYCARSPAHYYGGMDVWGQGTTVTVSSASGGGGSGGRASGGGGSDIVLTQSPGTLSLSPGERATLSCRASQSISSSFLAWYQQKPGQAPRLLIYGASRRATGIPDRFSGSGSGTDFTLTISRLEPEDSAVYYCQQYHSSPSWTFGQGTKLEIKTTTPAPRPPTPAPTIASQPLSLRPEACRPAAGGAVHTRGLDFACDIYIWAPLAGTCGVLLLSLVITLYCKRGRKKLLYIFKQPFMRPVQTTQEEDGCSCRFPEEEEGGCELRVKFSRSADAPAYKQGQNQLYNELNLGRREEYDVLDKRRGRDPEMGGKPRRKNPQEGLYNELQKDKMAEAYSEIGMKGERRRGKGHDGLYQGLSTATKDTYDALHMQALPPR

SEQ ID NO: 850 - protein, 488 aa, Artificial Sequence
  Description of Artificial Sequence: Synthetic polypeptide
MALPVTALLLPLALLLHAARPQVQLVESGGGLVQPGRSLRLSCAASGFTFDDYAMHWVRQAPGKGLEWVSGISWNSGSIGYADSVKGRFTISRDNAKNSLYLQMNSLRAEDTALYYCSVHSFLAYWGQGTLVTVSSASGGGGSGGRASGGGGSDIVMTQTPLSLPVTPGEPASISCRSSQSLLHSNGYNYLDWYLQKPGQSPQLLIYLGSNRASGVPDRFSGSGSGTDFTLKISRVEAEDVGVYYCMQALQTPYTFGQGTKVEIKTTTPAPRPPTPAPTIASQPLSLRPEACRPAAGGAVHTRGLDFACDIYIWAPLAGTCGVLLLSLVITLYCKRGRKKLLYIFKQPFMRPVQTTQEEDGCSCRFPEEEEGGCELRVKFSRSADAPAYKQGQNQLYNELNLGRREEYDVLDKRRGRDPEMGGKPRRKNPQEGLYNELQKDKMAEAYSEIGMKGERRRGKGHDGLYQGLSTATKDTYDALHMQALPPR

SEQ ID NO: 851 - protein, 487 aa, Artificial Sequence
  Description of Artificial Sequence: Synthetic polypeptide
MALPVTALLLPLALLLHAARPEVQLLESGGGLVQPGGSLRLSCAVSGFALSNHGMSWVRRAPGKGLEWVSGIVYSGSTYYAASVKGRFTISRDNSRNTLYLQMNSLRPEDTAIYYCSAHGGESDVWGQGTTVTVSSASGGGGSGGRASGGGGSDIVMTQTPLSLSVTPGQPASISCKSSQSLLRNDGKTPLYWYLQKAGQPPQLLIYEVSNRFSGVPDRFSGSGSGTDFTLKISRVEAEDVGAYYCMQNIQFPSFGGGTKLEIKTTTPAPRPPTPAPTIASQPLSLRPEACRPAAGGAVHTRGLDFACDIYIWAPLAGTCGVLLLSLVITLYCKRGRKKLLYIFKQPFMRPVQTTQEEDGCSCRFPEEEEGGCELRVKFSRSADAPAYKQGQNQLYNELNLGRREEYDVLDKRRGRDPEMGGKPRRKNPQEGLYNELQKDKMAEAYSEIGMKGERRRGKGHDGLYQGLSTATKDTYDALHMQALPPR

SEQ ID NO: 852 - protein, 493 aa, Artificial Sequence
  Description of Artificial Sequence: Synthetic polypeptide
MALPVTALLLPLALLLHAARPQVQLVQSGAEVRKTGASVKVSCKASGYIFDNFGINWVRQAPGQGLEWMGWINPKNNNTNYAQKFQGRVTITADESTNTAYMEVSSLRSEDTAVYYCARGPYYYQSYMDVWGQGTMVTVSSASGGGGSGGRASGGGGSDIVMTQTPLSLPVTPGEPASISCRSSQSLLHSNGYNYLNWYLQKPGQSPQLLIYLGSKRASGVPDRFSGSGSGTDFTLHITRVGAEDVGVYYCMQALQTPYTFGQGTKLEIKTTTPAPRPPTPAPTIASQPLSLRPEACRPAAGGAVHTRGLDFACDIYIWAPLAGTCGVLLLSLVITLYCKRGRKKLLYIFKQPFMRPVQTTQEEDGCSCRFPEEEEGGCELRVKFSRSADAPAYKQGQNQLYNELNLGRREEYDVLDKRRGRDPEMGGKPRRKNPQEGLYNELQKDKMAEAYSEIGMKGERRRGKGHDGLYQGLSTATKDTYDALHMQALPPR

SEQ ID NO: 853 - protein, 490 aa, Artificial Sequence
  Description of Artificial Sequence: Synthetic polypeptide
MALPVTALLLPLALLLHAARPQVQLQESGGGLVQPGGSLRLSCAASGFTFSSDAMTWVRQAPGKGLEWVSVISGSGGTTYYADSVKGRFTISRDNSKNTLYLQMNSLRAEDTAVYYCAKLDSSGYYYARGPRYWGQGTLVTVSSASGGGGSGGRASGGGGSDIQLTQSPSSLSASVGDRVTITCRASQSISSYLNWYQQKPGKAPKLLIYGASTLASGVPARFSGSGSGTHFTLTINSLQSEDSATYYCQQSYKRASFGQGTKVEIKTTTPAPRPPTPAPTIASQPLSLRPEACRPAAGGAVHTRGLDFACDIYIWAPLAGTCGVLLLSLVITLYCKRGRKKLLYIFKQPFMRPVQTTQEEDGCSCRFPEEEEGGCELRVKFSRSADAPAYKQGQNQLYNELNLGRREEYDVLDKRRGRDPEMGGKPRRKNPQEGLYNELQKDKMAEAYSEIGMKGERRRGKGHDGLYQGLSTATKDTYDALHMQALPPR

SEQ ID NO: 854 - protein, 491 aa, Artificial Sequence
  Description of Artificial Sequence: Synthetic polypeptide
MALPVTALLLPLALLLHAARPQVQLVQSGAEVKKPGASVKVSCKASGYTFSNYGITWVRQAPGQGLEWMGWISAYNGNTNYAQKFQGRVTMTRNTSISTAYMELSSLRSEDTAVYYCARGPYYYYMDVWGKGTMVTVSSASGGGGSGGRASGGGGSEIVMTQSPLSLPVTPGEPASISCRSSQSLLYSNGYNYVDWYLQKPGQSPQLLIYLGSNRASGVPDRFSGSGSGTDFKLQISRVEAEDVGIYYCMQGRQFPYSFGQGTKVEIKTTTPAPRPPTPAPTIASQPLSLRPEACRPAAGGAVHTRGLDFACDIYIWAPLAGTCGVLLLSLVITLYCKRGRKKLLYIFKQPFMRPVQTTQEEDGCSCRFPEEEEGGCELRVKFSRSADAPAYKQGQNQLYNELNLGRREEYDVLDKRRGRDPEMGGKPRRKNPQEGLYNELQKDKMAEAYSEIGMKGERRRGKGHDGLYQGLSTATKDTYDALHMQALPPR

SEQ ID NO: 855 - protein, 482 aa, Artificial Sequence
  Description of Artificial Sequence: Synthetic polypeptide
MALPVTALLLPLALLLHAARPEVQLLETGGGLVQPGGSLRLSCAVSGFALSNHGMSWVRRAPGKGLEWVSGIVYSGSTYYAASVKGRFTISRDNSRNTLYLQMNSLRPEDTAIYYCSAHGGESDVWGQGTTVTVSSASGGGGSGGRASGGGGSEIVLTQSPATLSVSPGESATLSCRASQSVSSNLAWYQQKPGQAPRLLIYGASTRASGIPDRFSGSGSGTDFTLTISSLQAEDVAVYYCQQYGSSLTFGGGTKVEIKTTTPAPRPPTPAPTIASQPLSLRPEACRPAAGGAVHTRGLDFACDIYIWAPLAGTCGVLLLSLVITLYCKRGRKKLLYIFKQPFMRPVQTTQEEDGCSCRFPEEEEGGCELRVKFSRSADAPAYKQGQNQLYNELNLGRREEYDVLDKRRGRDPEMGGKPRRKNPQEGLYNELQKDKMAEAYSEIGMKGERRRGKGHDGLYQGLSTATKDTYDALHMQALPPR

SEQ ID NO: 856 - protein, 483 aa, Artificial Sequence
  Description of Artificial Sequence: Synthetic polypeptide
MALPVTALLLPLALLLHAARPEVQLVETGGGLVQPGGSLRLSCAVSGFALSNHGMSWVRRAPGKGLEWVSGIVYSGSTYYAASVKGRFTISRDNSRNTLYLQMNSLRPEDTAIYYCSAHGGESDVWGQGTTVTVSSASGGGGSGGRASGGGGSEIVMTQSPATLSVSPGERATLSCRASQSVSSKLAWYQQKPGQAPRLLMYGASIRATGIPDRFSGSGSGTEFTLTISSLEPEDFAVYYCQQYGSSSWTFGQGTKVEIKTTTPAPRPPTPAPTIASQPLSLRPEACRPAAGGAVHTRGLDFACDIYIWAPLAGTCGVLLLSLVITLYCKRGRKKLLYIFKQPFMRPVQTTQEEDGCSCRFPEEEEGGCELRVKFSRSADAPAYKQGQNQLYNELNLGRREEYDVLDKRRGRDPEMGGKPRRKNPQEGLYNELQKDKMAEAYSEIGMKGERRRGKGHDGLYQGLSTATKDTYDALHMQALPPR

SEQ ID NO: 857 - protein, 485 aa, Artificial Sequence
  Description of Artificial Sequence: Synthetic polypeptide
MALPVTALLLPLALLLHAARPEVQLVETGGGVVQPGGSLRLSCAVSGFALSNHGMSWVRRAPGKGLEWVSGIVYSGSTYYAASVKGRFTISRDNSRNTLYLQMNSLRPEDTAIYYCSAHGGESDVWGQGTTVTVSSASGGGGSGGRASGGGGSEIVLTQSPGTLSLSPGERATLSCRASQSVGSTNLAWYQQKPGQAPRLLIYDASNRATGIPDRFSGGGSGTDFTLTISRLEPEDFAVYYCQQYGSSPPWTFGQGTKVEIKTTTPAPRPPTPAPTIASQPLSLRPEACRPAAGGAVHTRGLDFACDIYIWAPLAGTCGVLLLSLVITLYCKRGRKKLLYIFKQPFMRPVQTTQEEDGCSCRFPEEEEGGCELRVKFSRSADAPAYKQGQNQLYNELNLGRREEYDVLDKRRGRDPEMGGKPRRKNPQEGLYNELQKDKMAEAYSEIGMKGERRRGKGHDGLYQGLSTATKDTYDALHMQALPPR

SEQ ID NO: 858 - protein, 483 aa, Artificial Sequence
  Description of Artificial Sequence: Synthetic polypeptide
MALPVTALLLPLALLLHAARPQVQLVESGGGLVKPGGSLRLSCAASGFTFSDYYMSWIRQAPGKGLEWVSYISSSGSTIYYADSVKGRFTISRDNAKNSLYLQMNSLRAEDTAVYYCARESGDGMDVWGQGTTVTVSSASGGGGSGGRASGGGGSDIQMTQSPSSLSASVGDRVTITCRASQSISSYLNWYQQKPGKAPKLLIYAASSLQSGVPSRFSGSGSGTDFTLTISSLQPEDFATYYCQQSYTLAFGQGTKVDIKTTTPAPRPPTPAPTIASQPLSLRPEACRPAAGGAVHTRGLDFACDIYIWAPLAGTCGVLLLSLVITLYCKRGRKKLLYIFKQPFMRPVQTTQEEDGCSCRFPEEEEGGCELRVKFSRSADAPAYKQGQNQLYNELNLGRREEYDVLDKRRGRDPEMGGKPRRKNPQEGLYNELQKDKMAEAYSEIGMKGERRRGKGHDGLYQGLSTATKDTYDALHMQALPPR

SEQ ID NO: 859 - protein, 483 aa, Artificial Sequence
  Description of Artificial Sequence: Synthetic polypeptide
MALPVTALLLPLALLLHAARPEVQLVESGGGLVQPGGSLRLSCAVSGFALSNHGMSWVRRAPGKGLEWVSGIVYSGSTYYAASVKGRFTISRDNSRNTLYLQMNSLRPEDTAIYYCSAHGGESDVWGQGTTVTVSSASGGGGSGGRASGGGGSDIQLTQSPSSLSASVGDRVTITCRASQSISSYLNWYQQKPGKAPKLLIYAASSLQSGVPSRFSGSGSGTDFTLTISSLQPEDFATYYCQQSYSTPYTFGQGTKVEIKTTTPAPRPPTPAPTIASQPLSLRPEACRPAAGGAVHTRGLDFACDIYIWAPLAGTCGVLLLSLVITLYCKRGRKKLLYIFKQPFMRPVQTTQEEDGCSCRFPEEEEGGCELRVKFSRSADAPAYKQGQNQLYNELNLGRREEYDVLDKRRGRDPEMGGKPRRKNPQEGLYNELQKDKMAEAYSEIGMKGERRRGKGHDGLYQGLSTATKDTYDALHMQALPPR

SEQ ID NO: 860 - protein, 490 aa, Artificial Sequence
  Description of Artificial Sequence: Synthetic polypeptide
MALPVTALLLPLALLLHAARPQVQLVQSGGGLVKPGGSLRLSCAASGFTFSDYYMSWIRQAPGKGLEWVSYISSSGNTIYYADSVKGRFTISRDNAKNSLYLQMNSLRAEDTAVYYCARSTMVREDYWGQGTLVTVSSASGGGGSGGRASGGGGSDIVLTQSPLSLPVTLGQPASISCKSSESLVHNSGKTYLNWFHQRPGQSPRRLIYEVSNRDSGVPDRFTGSGSGTDFTLKISRVEAEDVGVYYCMQGTHWPGTFGQGTKLEIKTTTPAPRPPTPAPTIASQPLSLRPEACRPAAGGAVHTRGLDFACDIYIWAPLAGTCGVLLLSLVITLYCKRGRKKLLYIFKQPFMRPVQTTQEEDGCSCRFPEEEEGGCELRVKFSRSADAPAYKQGQNQLYNELNLGRREEYDVLDKRRGRDPEMGGKPRRKNPQEGLYNELQKDKMAEAYSEIGMKGERRRGKGHDGLYQGLSTATKDTYDALHMQALPPR

SEQ ID NO: 861 - protein, 483 aa, Artificial Sequence
  Description of Artificial Sequence: Synthetic polypeptide
MALPVTALLLPLALLLHAARPQVQLVESGGGLVQPGGSLRLSCAVSGFALSNHGMSWVRRAPGKGLEWVSGIVYSGSTYYAASVKGRFTISRDNSRNTLYLQMNSLRPEDTAIYYCSAHGGESDVWGQGTTVTVSSASGGGGSGGRASGGGGSDIRLTQSPSPLSASVGDRVTITCQASEDINKFLNWYHQTPGKAPKLLIYDASTLQTGVPSRFSGSGSGTDFTLTINSLQPEDIGTYYCQQYESLPLTFGGGTKVEIKTTTPAPRPPTPAPTIASQPLSLRPEACRPAAGGAVHTRGLDFACDIYIWAPLAGTCGVLLLSLVITLYCKRGRKKLLYIFKQPFMRPVQTTQEEDGCSCRFPEEEEGGCELRVKFSRSADAPAYKQGQNQLYNELNLGRREEYDVLDKRRGRDPEMGGKPRRKNPQEGLYNELQKDKMAEAYSEIGMKGERRRGKGHDGLYQGLSTATKDTYDALHMQALPPR

SEQ ID NO: 862 - protein, 484 aa, Artificial Sequence
  Description of Artificial Sequence: Synthetic polypeptide
MALPVTALLLPLALLLHAARPEVQLVETGGGLVQPGGSLRLSCAVSGFALSNHGMSWVRRAPGKGLEWVSGIVYSGSTYYAASVKGRFTISRDNSRNTLYLQMNSLRPEDTAIYYCSAHGGESDVWGQGTTVTVSSASGGGGSGGRASGGGGSETTLTQSPATLSVSPGERATLSCRASQSVGSNLAWYQQKPGQGPRLLIYGASTRATGIPARFSGSGSGTEFTLTISSLQPEDFAVYYCQQYNDWLPVTFGQGTKVEIKTTTPAPRPPTPAPTIASQPLSLRPEACRPAAGGAVHTRGLDFACDIYIWAPLAGTCGVLLLSLVITLYCKRGRKKLLYIFKQPFMRPVQTTQEEDGCSCRFPEEEEGGCELRVKFSRSADAPAYKQGQNQLYNELNLGRREEYDVLDKRRGRDPEMGGKPRRKNPQEGLYNELQKDKMAEAYSEIGMKGERRRGKGHDGLYQGLSTATKDTYDALHMQALPPR

SEQ ID NO: 863 - protein, 485 aa, Artificial Sequence
  Description of Artificial Sequence: Synthetic polypeptide
MALPVTALLLPLALLLHAARPEVQLVESGGGLVQPGGSLRLSCAVSGFALSNHGMSWVRRAPGKGLEWVSGIVYSGSTYYAASVKGRFTISRDNSRNTLYLQMNSLRPEDTAIYYCSAHGGESDVWGQGTTVTVSSASGGGGSGGRASGGGGSEIVLTQSPGTLSLSPGERATLSCRASQSIGSSSLAWYQQKPGQAPRLLMYGASSRASGIPDRFSGSGSGTDFTLTISRLEPEDFAVYYCQQYAGSPPFTFGQGTKVEIKTTTPAPRPPTPAPTIASQPLSLRPEACRPAAGGAVHTRGLDFACDIYIWAPLAGTCGVLLLSLVITLYCKRGRKKLLYIFKQPFMRPVQTTQEEDGCSCRFPEEEEGGCELRVKFSRSADAPAYKQGQNQLYNELNLGRREEYDVLDKRRGRDPEMGGKPRRKNPQEGLYNELQKDKMAEAYSEIGMKGERRRGKGHDGLYQGLSTATKDTYDALHMQALPPR

SEQ ID NO: 864 - DNA, 1470 bp, Artificial Sequence
  Description of Artificial Sequence: Synthetic polynucleotide
atggccctccctgtcaccgccctgctgcttccgctggctcttctgctccacgccgctcggccccaagtgcaactcgtggaatctggtggaggactcgtgcaacccggaagatcgcttagactgtcgtgtgccgccagcgggttcactttctcgaactacgcgatgtcctgggtccgccaggcacccggaaagggactcggttgggtgtccggcatttcccggtccggcgaaaatacctactacgccgactccgtgaagggccgcttcaccatctcaagggacaacagcaaaaacaccctgtacttgcaaatgaactccctgcgggatgaagatacagccgtgtactattgcgcccggtcgcctgcccattactacggcggaatggacgtctggggacagggaaccactgtgactgtcagcagcgcgtcgggtggcggcggctcagggggtcgggcctccggggggggagggtccgacatcgtgctgacccagtccccgggaaccctgagcctgagcccgggagagcgcgcgaccctgtcatgccgggcatcccagagcattagctcctcctttctcgcctggtatcagcagaagcccggacaggccccgaggctgctgatctacggcgctagcagaagggctaccggaatcccagaccggttctccggctccggttccgggaccgatttcacccttactatctcgcgcctggaacctgaggactccgccgtctactactgccagcagtaccactcatccccgtcgtggacgttcggacagggcaccaagctggagattaagaccactaccccagcaccgaggccacccaccccggctcctaccatcgcctcccagcctctgtccctgcgtccggaggcatgtagacccgcagctggtggggccgtgcatacccggggtcttgacttcgcctgcgatatctacatttgggcccctctggctggtacttgcggggtcctgctgctttcactcgtgatcactctttactgtaagcgcggtcggaagaagctgctgtacatctttaagcaacccttcatgaggcctgtgcagactactcaagaggaggacggctgttcatgccggttcccagaggaggaggaaggcggctgcgaactgcgcgtgaaattcagccgcagcgcagatgctccagcctacaagcaggggcagaaccagctctacaacgaactcaatcttggtcggagagaggagtacgacgtgctggacaagcggagaggacgggacccagaaatgggcgggaagccgcgcagaaagaatccccaagagggcctgtacaacgagctccaaaaggataagatggcagaagcctatagcgagattggtatgaaaggggaacgcagaagaggcaaaggccacgacggactgtaccagggactcagcaccgccaccaaggacacctatgacgctcttcacatgcaggccctgccgcctcgg

SEQ ID NO: 865 - DNA, 1464 bp, Artificial Sequence
  Description of Artificial Sequence: Synthetic polynucleotide
atggccctccctgtcaccgccctgctgcttccgctggctcttctgctccacgccgctcggccccaagtgcaactcgtcgaatccggtggaggtctggtccaacctggtagaagcctgagactgtcgtgtgcggccagcggattcacctttgatgactatgctatgcactgggtgcggcaggccccaggaaagggcctggaatgggtgtcgggaattagctggaactccgggtccattggctacgccgactccgtgaagggccgcttcaccatctcccgcgacaacgcaaagaactccctgtacttgcaaatgaactcgctcagggctgaggataccgcgctgtactactgctccgtgcattccttcctggcctactggggacagggaactctggtcaccgtgtcgagcgcctccggcggcgggggctcgggtggacgggcctcgggcggaggggggtccgacatcgtgatgacccagaccccgctgagcttgcccgtgactcccggagagcctgcatccatctcctgccggtcatcccagtcccttctccactccaacggatacaactacctcgactggtacctccagaagccgggacagagccctcagcttctgatctacctggggtcaaatagagcctcaggagtgccggatcggttcagcggatctggttcgggaactgatttcactctgaagatttcccgcgtggaagccgaggacgtgggcgtctactactgtatgcaggcgctgcagaccccctataccttcggccaagggacgaaagtggagatcaagaccactaccccagcaccgaggccacccaccccggctcctaccatcgcctcccagcctctgtccctgcgtccggaggcatgtagacccgcagctggtggggccgtgcatacccggggtcttgacttcgcctgcgatatctacatttgggcccctctggctggtacttgcggggtcctgctgctttcactcgtgatcactctttactgtaagcgcggtcggaagaagctgctgtacatctttaagcaacccttcatgaggcctgtgcagactactcaagaggaggacggctgttcatgccggttcccagaggaggaggaaggcggctgcgaactgcgcgtgaaattcagccgcagcgcagatgctccagcctacaagcaggggcagaaccagctctacaacgaactcaatcttggtcggagagaggagtacgacgtgctggacaagcggagaggacgggacccagaaatgggcgggaagccgcgcagaaagaatccccaagagggcctgtacaacgagctccaaaaggataagatggcagaagcctatagcgagattggtatgaaaggggaacgcagaagaggcaaaggccacgacggactgtaccagggactcagcaccgccaccaaggacacctatgacgctcttcacatgcaggccctgccgcctcgg

SEQ ID NO: 866 - DNA, 1461 bp, Artificial Sequence
  Description of Artificial Sequence: Synthetic polynucleotide
atggccctccctgtcaccgccctgctgcttccgctggctcttctgctccacgccgctcggcccgaagtgcaattgttggaatctggaggaggacttgtgcagcctggaggatcactgagactttcgtgtgcggtgtcaggcttcgccctgagcaaccacggcatgagctgggtgcggagagccccggggaagggtctggaatgggtgtccgggatcgtctactccggttcaacttactacgccgcaagcgtgaagggtcgcttcaccatttcccgcgataactcccggaacaccctgtacctccaaatgaactccctgcggcccgaggacaccgccatctactactgttccgcgcatggaggagagtccgatgtctggggacagggcactaccgtgaccgtgtcgagcgcctcggggggaggaggctccggcggtcgcgcctccggggggggtggcagcgacattgtgatgacgcagactccactctcgctgtccgtgaccccgggacagcccgcgtccatctcgtgcaagagctcccagagcctgctgaggaacgacggaaagactcctctgtattggtacctccagaaggctggacagcccccgcaactgctcatctacgaagtgtcaaatcgcttctccggggtgccggatcggttttccggctcgggatcgggcaccgacttcaccctgaaaatctccagggtcgaggccgaggacgtgggagcctactactgcatgcaaaacatccagttcccttccttcggcggcggcacaaagctggagattaagaccactaccccagcaccgaggccacccaccccggctcctaccatcgcctcccagcctctgtccctgcgtccggaggcatgtagacccgcagctggtggggccgtgcatacccggggtcttgacttcgcctgcgatatctacatttgggcccctctggctggtacttgcggggtcctgctgctttcactcgtgatcactctttactgtaagcgcggtcggaagaagctgctgtacatctttaagcaacccttcatgaggcctgtgcagactactcaagaggaggacggctgttcatgccggttcccagaggaggaggaaggcggctgcgaactgcgcgtgaaattcagccgcagcgcagatgctccagcctacaagcaggggcagaaccagctctacaacgaactcaatcttggtcggagagaggagtacgacgtgctggacaagcggagaggacgggacccagaaatgggcgggaagccgcgcagaaagaatccccaagagggcctgtacaacgagctccaaaaggataagatggcagaagcctatagcgagattggtatgaaaggggaacgcagaagaggcaaaggccacgacggactgtaccagggactcagcaccgccaccaaggacacctatgacgctcttcacatgcaggccctgccgcctcgg

SEQ ID NO: 867 - DNA, 1479 bp, Artificial Sequence
  Description of Artificial Sequence: Synthetic polynucleotide
atggccctccctgtcaccgccctgctgcttccgctggctcttctgctccacgccgctcggccccaagtccaactcgtccagtccggcgcagaagtcagaaaaaccggtgctagcgtgaaagtgtcctgcaaggcctccggctacattttcgataacttcggaatcaactgggtcagacaggccccgggccaggggctggaatggatgggatggatcaaccccaagaacaacaacaccaactacgcacagaagttccagggccgcgtgactatcaccgccgatgaatcgaccaataccgcctacatggaggtgtcctccctgcggtcggaggacactgccgtgtattactgcgcgaggggcccatactactaccaaagctacatggacgtctggggacagggaaccatggtgaccgtgtcatccgcctccggtggtggaggctccggggggcgggcttcaggaggcggaggaagcgatattgtgatgacccagactccgcttagcctgcccgtgactcctggagaaccggcctccatttcctgccggtcctcgcaatcactcctgcattccaacggttacaactacctgaattggtacctccagaagcctggccagtcgccccagttgctgatctatctgggctcgaagcgcgcctccggggtgcctgaccggtttagcggatctgggagcggcacggacttcactctccacatcacccgcgtgggagcggaggacgtgggagtgtactactgtatgcaggcgctgcagactccgtacacattcggacagggcaccaagctggagatcaagaccactaccccagcaccgaggccacccaccccggctcctaccatcgcctcccagcctctgtccctgcgtccggaggcatgtagacccgcagctggtggggccgtgcatacccggggtcttgacttcgcctgcgatatctacatttgggcccctctggctggtacttgcggggtcctgctgctttcactcgtgatcactctttactgtaagcgcggtcggaagaagctgctgtacatctttaagcaacccttcatgaggcctgtgcagactactcaagaggaggacggctgttcatgccggttcccagaggaggaggaaggcggctgcgaactgcgcgtgaaattcagccgcagcgcagatgctccagcctacaagcaggggcagaaccagctctacaacgaactcaatcttggtcggagagaggagtacgacgtgctggacaagcggagaggacgggacccagaaatgggcgggaagccgcgcagaaagaatccccaagagggcctgtacaacgagctccaaaaggataagatggcagaagcctatagcgagattggtatgaaaggggaacgcagaagaggcaaaggccacgacggactgtaccagggactcagcaccgccaccaaggacacctatgacgctcttcacatgcaggccctgccgcctcgg

SEQ ID NO: 868 - DNA, 1470 bp, Artificial Sequence
  Description of Artificial Sequence: Synthetic polynucleotide
atggccctccctgtcaccgccctgctgcttccgctggctcttctgctccacgccgctcggccccaagtgcaacttcaagaatcaggcggaggactcgtgcagcccggaggatcattgcggctctcgtgcgccgcctcgggcttcaccttctcgagcgacgccatgacctgggtccgccaggccccggggaaggggctggaatgggtgtctgtgatttccggctccgggggaactacgtactacgccgattccgtgaaaggtcgcttcactatctcccgggacaacagcaagaacaccctttatctgcaaatgaattccctccgcgccgaggacaccgccgtgtactactgcgccaagctggactcctcgggctactactatgcccggggtccgagatactggggacagggaaccctcgtgaccgtgtcctccgcgtccggcggaggagggtcgggagggcgggcctccggcggcggcggttcggacatccagctgacccagtccccatcctcactgagcgcaagcgtgggcgacagagtcaccattacatgcagggcgtcccagagcatcagctcctacctgaactggtaccaacagaagcctggaaaggctcctaagctgttgatctacggggcttcgaccctggcatccggggtgcccgcgaggtttagcggaagcggtagcggcactcacttcactctgaccattaacagcctccagtccgaggattcagccacttactactgtcagcagtcctacaagcgggccagcttcggacagggcactaaggtcgagatcaagaccactaccccagcaccgaggccacccaccccggctcctaccatcgcctcccagcctctgtccctgcgtccggaggcatgtagacccgcagctggtggggccgtgcatacccggggtcttgacttcgcctgcgatatctacatttgggcccctctggctggtacttgcggggtcctgctgctttcactcgtgatcactctttactgtaagcgcggtcggaagaagctgctgtacatctttaagcaacccttcatgaggcctgtgcagactactcaagaggaggacggctgttcatgccggttcccagaggaggaggaaggcggctgcgaactgcgcgtgaaattcagccgcagcgcagatgctccagcctacaagcaggggcagaaccagctctacaacgaactcaatcttggtcggagagaggagtacgacgtgctggacaagcggagaggacgggacccagaaatgggcgggaagccgcgcagaaagaatccccaagagggcctgtacaacgagctccaaaaggataagatggcagaagcctatagcgagattggtatgaaaggggaacgcagaagaggcaaaggccacgacggactgtaccagggactcagcaccgccaccaaggacacctatgacgctcttcacatgcaggccctgccgcctcgg

SEQ ID NO: 869 - DNA, 1473 bp, Artificial Sequence
  Description of Artificial Sequence: Synthetic polynucleotide
atggccctccctgtcaccgccctgctgcttccgctggctcttctgctccacgccgctcggccccaagtccaactggtccagagcggtgcagaagtgaagaagcccggagcgagcgtgaaagtgtcctgcaaggcttccgggtacaccttctccaactacggcatcacttgggtgcgccaggccccgggacagggcctggaatggatggggtggatttccgcgtacaacggcaatacgaactacgctcagaagttccagggtagagtgaccatgactaggaacacctccatttccaccgcctacatggaactgtcctccctgcggagcgaggacaccgccgtgtactattgcgcccggggaccatactactactacatggatgtctgggggaaggggactatggtcaccgtgtcatccgcctcgggaggcggcggatcaggaggacgcgcctctggtggtggaggatcggagatcgtgatgacccagagccctctctccttgcccgtgactcctggggagcccgcatccatttcatgccggagctcccagtcacttctctactccaacggctataactacgtggattggtacctccaaaagccgggccagagcccgcagctgctgatctacctgggctcgaacagggccagcggagtgcctgaccggttctccgggtcgggaagcgggaccgacttcaagctgcaaatctcgagagtggaggccgaggacgtgggaatctactactgtatgcagggccgccagtttccgtactcgttcggacagggcaccaaagtggaaatcaagaccactaccccagcaccgaggccacccaccccggctcctaccatcgcctcccagcctctgtccctgcgtccggaggcatgtagacccgcagctggtggggccgtgcatacccggggtcttgacttcgcctgcgatatctacatttgggcccctctggctggtacttgcggggtcctgctgctttcactcgtgatcactctttactgtaagcgcggtcggaagaagctgctgtacatctttaagcaacccttcatgaggcctgtgcagactactcaagaggaggacggctgttcatgccggttcccagaggaggaggaaggcggctgcgaactgcgcgtgaaattcagccgcagcgcagatgctccagcctacaagcaggggcagaaccagctctacaacgaactcaatcttggtcggagagaggagtacgacgtgctggacaagcggagaggacgggacccagaaatgggcgggaagccgcgcagaaagaatccccaagagggcctgtacaacgagctccaaaaggataagatggcagaagcctatagcgagattggtatgaaaggggaacgcagaagaggcaaaggccacgacggactgtaccagggactcagcaccgccaccaaggacacctatgacgctcttcacatgcaggccctgccgcctcgg

SEQ ID NO: 870 - DNA, 1446 bp, Artificial Sequence
  Description of Artificial Sequence: Synthetic polynucleotide
atggccctccctgtcaccgccctgctgcttccgctggctcttctgctccacgccgctcggcccgaagtgcaattgctcgaaactggaggaggtctggtgcaacctggaggatcacttcgcctgtcctgcgccgtgtcgggctttgccctgtccaaccatggaatgagctgggtccgccgcgcgccggggaagggcctcgaatgggtgtccggcatcgtctactccggctccacctactacgccgcgtccgtgaagggccggttcacgatttcacgggacaactcgcggaacaccctgtacctccaaatgaattcccttcggccggaggatactgccatctactactgctccgcccacggtggcgaatccgacgtctggggccagggaaccaccgtgaccgtgtccagcgcgtccgggggaggaggaagcgggggtagagcatcgggtggaggcggatcagagatcgtgctgacccagtcccccgccaccttgagcgtgtcaccaggagagtccgccaccctgtcatgccgcgccagccagtccgtgtcctccaacctggcttggtaccagcagaagccggggcaggcccctagactcctgatctatggggcgtcgacccgggcatctggaattcccgataggttcagcggatcgggctcgggcactgacttcactctgaccatctcctcgctgcaagccgaggacgtggctgtgtactactgtcagcagtacggaagctccctgactttcggtggcgggaccaaagtcgagattaagaccactaccccagcaccgaggccacccaccccggctcctaccatcgcctcccagcctctgtccctgcgtccggaggcatgtagacccgcagctggtggggccgtgcatacccggggtcttgacttcgcctgcgatatctacatttgggcccctctggctggtacttgcggggtcctgctgctttcactcgtgatcactctttactgtaagcgcggtcggaagaagctgctgtacatctttaagcaacccttcatgaggcctgtgcagactactcaagaggaggacggctgttcatgccggttcccagaggaggaggaaggcggctgcgaactgcgcgtgaaattcagccgcagcgcagatgctccagcctacaagcaggggcagaaccagctctacaacgaactcaatcttggtcggagagaggagtacgacgtgctggacaagcggagaggacgggacccagaaatgggcgggaagccgcgcagaaagaatccccaagagggcctgtacaacgagctccaaaaggataagatggcagaagcctatagcgagattggtatgaaaggggaacgcagaagaggcaaaggccacgacggactgtaccagggactcagcaccgccaccaaggacacctatgacgctcttcacatgcaggccctgccgcctcgg

SEQ ID NO: 871 - DNA, 1449 bp, Artificial Sequence
  Description of Artificial Sequence: Synthetic polynucleotide
atggccctccctgtcaccgccctgctgcttccgctggctcttctgctccacgccgctcggcccgaagtgcaattggtggaaactggaggaggacttgtgcaacctggaggatcattgagactgagctgcgcagtgtcgggattcgccctgagcaaccatggaatgtcctgggtcagaagggcccctggaaaaggcctcgaatgggtgtcagggatcgtgtactccggttccacttactacgccgcctccgtgaaggggcgcttcactatctcacgggataactcccgcaataccctgtacctccaaatgaacagcctgcggccggaggataccgccatctactactgttccgcccacggtggagagtctgacgtctggggccagggaactaccgtgaccgtgtcctccgcgtccggcggtggagggagcggcggccgcgccagcggcggcggaggctccgagatcgtgatgacccagagccccgctactctgtcggtgtcgcccggagaaagggcgaccctgtcctgccgggcgtcgcagtccgtgagcagcaagctggcttggtaccagcagaagccgggccaggcaccacgcctgcttatgtacggtgcctccattcgggccaccggaatcccggaccggttctcggggtcggggtccggtaccgagttcacactgaccatttcctcgctcgagcccgaggactttgccgtctattactgccagcagtacggctcctcctcatggacgttcggccaggggaccaaggtcgaaatcaagaccactaccccagcaccgaggccacccaccccggctcctaccatcgcctcccagcctctgtccctgcgtccggaggcatgtagacccgcagctggtggggccgtgcatacccggggtcttgacttcgcctgcgatatctacatttgggcccctctggctggtacttgcggggtcctgctgctttcactcgtgatcactctttactgtaagcgcggtcggaagaagctgctgtacatctttaagcaacccttcatgaggcctgtgcagactactcaagaggaggacggctgttcatgccggttcccagaggaggaggaaggcggctgcgaactgcgcgtgaaattcagccgcagcgcagatgctccagcctacaagcaggggcagaaccagctctacaacgaactcaatcttggtcggagagaggagtacgacgtgctggacaagcggagaggacgggacccagaaatgggcgggaagccgcgcagaaagaatccccaagagggcctgtacaacgagctccaaaaggataagatggcagaagcctatagcgagattggtatgaaaggggaacgcagaagaggcaaaggccacgacggactgtaccagggactcagcaccgccaccaaggacacctatgacgctcttcacatgcaggccctgccgcctcgg

SEQ ID NO: 872 - DNA, 1455 bp, Artificial Sequence
  Description of Artificial Sequence: Synthetic polynucleotide
atggccctccctgtcaccgccctgctgcttccgctggctcttctgctccacgccgctcggcccgaagtgcaattggtggagactggaggaggagtggtgcaacctggaggaagcctgagactgtcatgcgcggtgtcgggcttcgccctctccaaccacggaatgtcctgggtccgccgggcccctgggaaaggacttgaatgggtgtccggcatcgtgtactcgggttccacctactacgcggcctcagtgaagggccggtttactattagccgcgacaactccagaaacacactgtacctccaaatgaactcgctgcggccggaagataccgctatctactactgctccgcccatgggggagagtcggacgtctggggacagggcaccactgtcactgtgtccagcgcttccggcggtggtggaagcgggggacgggcctcaggaggcggtggcagcgagattgtgctgacccagtcccccgggaccctgagcctgtccccgggagaaagggccaccctctcctgtcgggcatcccagtccgtggggtctactaaccttgcatggtaccagcagaagcccggccaggcccctcgcctgctgatctacgacgcgtccaatagagccaccggcatcccggatcgcttcagcggaggcggatcgggcaccgacttcaccctcaccatttcaaggctggaaccggaggacttcgccgtgtactactgccagcagtatggttcgtccccaccctggacgttcggccaggggactaaggtcgagatcaagaccactaccccagcaccgaggccacccaccccggctcctaccatcgcctcccagcctctgtccctgcgtccggaggcatgtagacccgcagctggtggggccgtgcatacccggggtcttgacttcgcctgcgatatctacatttgggcccctctggctggtacttgcggggtcctgctgctttcactcgtgatcactctttactgtaagcgcggtcggaagaagctgctgtacatctttaagcaacccttcatgaggcctgtgcagactactcaagaggaggacggctgttcatgccggttcccagaggaggaggaaggcggctgcgaactgcgcgtgaaattcagccgcagcgcagatgctccagcctacaagcaggggcagaaccagctctacaacgaactcaatcttggtcggagagaggagtacgacgtgctggacaagcggagaggacgggacccagaaatgggcgggaagccgcgcagaaagaatccccaagagggcctgtacaacgagctccaaaaggataagatggcagaagcctatagcgagattggtatgaaaggggaacgcagaagaggcaaaggccacgacggactgtaccagggactcagcaccgccaccaaggacacctatgacgctcttcacatgcaggccctgccgcctcgg

SEQ ID NO: 873 - DNA, 1449 bp, Artificial Sequence
  Description of Artificial Sequence: Synthetic polynucleotide
atggccctccctgtcaccgccctgctgcttccgctggctcttctgctccacgccgctcggccccaagtgcaactcgtggaatctggtggaggactcgtgaaacctggaggatcattgagactgtcatgcgcggcctcgggattcacgttctccgattactacatgagctggattcgccaggctccggggaagggactggaatgggtgtcctacatttcctcatccggctccaccatctactacgcggactccgtgaaggggagattcaccattagccgcgataacgccaagaacagcctgtaccttcagatgaactccctgcgggctgaagatactgccgtctactactgcgcaagggagagcggagatgggatggacgtctggggacagggtaccactgtgaccgtgtcgtcggcctccggcggagggggttcgggtggaagggccagcggcggcggaggcagcgacatccagatgacccagtccccctcatcgctgtccgcctccgtgggcgaccgcgtcaccatcacatgccgggcctcacagtcgatctcctcctacctcaattggtatcagcagaagcccggaaaggcccctaagcttctgatctacgcagcgtcctccctgcaatccggggtcccatctcggttctccggctcgggcagcggtaccgacttcactctgaccatctcgagcctgcagccggaggacttcgccacttactactgtcagcaaagctacaccctcgcgtttggccagggcaccaaagtggacatcaagaccactaccccagcaccgaggccacccaccccggctcctaccatcgcctcccagcctctgtccctgcgtccggaggcatgtagacccgcagctggtggggccgtgcatacccggggtcttgacttcgcctgcgatatctacatttgggcccctctggctggtacttgcggggtcctgctgctttcactcgtgatcactctttactgtaagcgcggtcggaagaagctgctgtacatctttaagcaacccttcatgaggcctgtgcagactactcaagaggaggacggctgttcatgccggttcccagaggaggaggaaggcggctgcgaactgcgcgtgaaattcagccgcagcgcagatgctccagcctacaagcaggggcagaaccagctctacaacgaactcaatcttggtcggagagaggagtacgacgtgctggacaagcggagaggacgggacccagaaatgggcgggaagccgcgcagaaagaatccccaagagggcctgtacaacgagctccaaaaggataagatggcagaagcctatagcgagattggtatgaaaggggaacgcagaagaggcaaaggccacgacggactgtaccagggactcagcaccgccaccaaggacacctatgacgctcttcacatgcaggccctgccgcctcgg

SEQ ID NO: 874 - DNA, 1449 bp, Artificial Sequence
  Description of Artificial Sequence: Synthetic polynucleotide
atggccctccctgtcaccgccctgctgcttccgctggctcttctgctccacgccgctcggcccgaagtgcaattggtggaatcagggggaggacttgtgcagcctggaggatcgctgagactgtcatgtgccgtgtccggctttgccctgtccaaccacgggatgtcctgggtccgccgcgcgcctggaaagggcctcgaatgggtgtcgggtattgtgtacagcggtagcacctactatgccgcatccgtgaaggggagattcaccatcagccgggacaactccaggaacactctgtacctccaaatgaattcgctgaggccagaggacactgccatctactactgctccgcgcatggcggagagtccgacgtctggggacaggggaccaccgtgaccgtgtctagcgcgtccggcggaggcggcagcgggggtcgggcatcagggggcggcggatcggacatccagctcacccagtccccgagctcgctgtccgcctccgtgggagatcgggtcaccatcacgtgccgcgccagccagtcgatttcctcctacctgaactggtaccaacagaagcccggaaaagccccgaagcttctcatctacgccgcctcgagcctgcagtcaggagtgccctcacggttctccggctccggttccggtactgatttcaccctgaccatttcctccctgcaaccggaggacttcgctacttactactgccagcagtcgtactccaccccctacactttcggacaaggcaccaaggtcgaaatcaagaccactaccccagcaccgaggccacccaccccggctcctaccatcgcctcccagcctctgtccctgcgtccggaggcatgtagacccgcagctggtggggccgtgcatacccggggtcttgacttcgcctgcgatatctacatttgggcccctctggctggtacttgcggggtcctgctgctttcactcgtgatcactctttactgtaagcgcggtcggaagaagctgctgtacatctttaagcaacccttcatgaggcctgtgcagactactcaagaggaggacggctgttcatgccggttcccagaggaggaggaaggcggctgcgaactgcgcgtgaaattcagccgcagcgcagatgctccagcctacaagcaggggcagaaccagctctacaacgaactcaatcttggtcggagagaggagtacgacgtgctggacaagcggagaggacgggacccagaaatgggcgggaagccgcgcagaaagaatccccaagagggcctgtacaacgagctccaaaaggataagatggcagaagcctatagcgagattggtatgaaaggggaacgcagaagaggcaaaggccacgacggactgtaccagggactcagcaccgccaccaaggacacctatgacgctcttcacatgcaggccctgccgcctcgg

SEQ ID NO: 875 - DNA, 1470 bp, Artificial Sequence
  Description of Artificial Sequence: Synthetic polynucleotide
atggccctccctgtcaccgccctgctgcttccgctggctcttctgctccacgccgctcggccccaagtgcaactggtgcaaagcggaggaggattggtcaaacccggaggaagcctgagactgtcatgcgcggcctctggattcaccttctccgattactacatgtcatggatcagacaggccccggggaagggcctcgaatgggtgtcctacatctcgtcctccgggaacaccatctactacgccgacagcgtgaagggccgctttaccatttcccgcgacaacgcaaagaactcgctgtaccttcagatgaattccctgcgggctgaagataccgcggtgtactattgcgcccggtccactatggtccgggaggactactggggacagggcacactcgtgaccgtgtccagcgcgagcgggggtggaggcagcggtggacgcgcctccggcggcggcggttcagacatcgtgctgactcagtcgcccctgtcgctgccggtcaccctgggccaaccggcctcaattagctgcaagtcctcggagagcctggtgcacaactcaggaaagacttacctgaactggttccatcagcggcctggacagtccccacggaggctcatctatgaagtgtccaacagggattcgggggtgcccgaccgcttcactggctccgggtccggcaccgacttcaccttgaaaatctccagagtggaagccgaggacgtgggcgtgtactactgtatgcagggtacccactggcctggaacctttggacaaggaactaagctcgagattaagaccactaccccagcaccgaggccacccaccccggctcctaccatcgcctcccagcctctgtccctgcgtccggaggcatgtagacccgcagctggtggggccgtgcatacccggggtcttgacttcgcctgcgatatctacatttgggcccctctggctggtacttgcggggtcctgctgctttcactcgtgatcactctttactgtaagcgcggtcggaagaagctgctgtacatctttaagcaacccttcatgaggcctgtgcagactactcaagaggaggacggctgttcatgccggttcccagaggaggaggaaggcggctgcgaactgcgcgtgaaattcagccgcagcgcagatgctccagcctacaagcaggggcagaaccagctctacaacgaactcaatcttggtcggagagaggagtacgacgtgctggacaagcggagaggacgggacccagaaatgggcgggaagccgcgcagaaagaatccccaagagggcctgtacaacgagctccaaaaggataagatggcagaagcctatagcgagattggtatgaaaggggaacgcagaagaggcaaaggccacgacggactgtaccagggactcagcaccgccaccaaggacacctatgacgctcttcacatgcaggccctgccgcctcgg

SEQ ID NO: 876 - DNA, 1449 bp, Artificial Sequence
  Description of Artificial Sequence: Synthetic polynucleotide
atggccctccctgtcaccgccctgctgcttccgctggctcttctgctccacgccgctcggccccaagtgcaactcgtggaatctggtggaggactcgtgcaacccggtggaagccttaggctgtcgtgcgccgtcagcgggtttgctctgagcaaccatggaatgtcctgggtccgccgggcaccgggaaaagggctggaatgggtgtccggcatcgtgtacagcgggtcaacctattacgccgcgtccgtgaagggcagattcactatctcaagagacaacagccggaacaccctgtacttgcaaatgaattccctgcgccccgaggacaccgccatctactactgctccgcccacggaggagagtcggacgtgtggggccagggaacgactgtgactgtgtccagcgcatcaggagggggtggttcgggcggccgggcctcggggggaggaggttccgacattcggctgacccagtccccgtccccactgtcggcctccgtcggcgaccgcgtgaccatcacttgtcaggcgtccgaggacattaacaagttcctgaactggtaccaccagacccctggaaaggcccccaagctgctgatctacgatgcctcgacccttcaaactggagtgcctagccggttctccgggtccggctccggcactgatttcactctgaccatcaactcattgcagccggaagatatcgggacctactattgccagcagtacgaatccctcccgctcacattcggcgggggaaccaaggtcgagattaagaccactaccccagcaccgaggccacccaccccggctcctaccatcgcctcccagcctctgtccctgcgtccggaggcatgtagacccgcagctggtggggccgtgcatacccggggtcttgacttcgcctgcgatatctacatttgggcccctctggctggtacttgcggggtcctgctgctttcactcgtgatcactctttactgtaagcgcggtcggaagaagctgctgtacatctttaagcaacccttcatgaggcctgtgcagactactcaagaggaggacggctgttcatgccggttcccagaggaggaggaaggcggctgcgaactgcgcgtgaaattcagccgcagcgcagatgctccagcctacaagcaggggcagaaccagctctacaacgaactcaatcttggtcggagagaggagtacgacgtgctggacaagcggagaggacgggacccagaaatgggcgggaagccgcgcagaaagaatccccaagagggcctgtacaacgagctccaaaaggataagatggcagaagcctatagcgagattggtatgaaaggggaacgcagaagaggcaaaggccacgacggactgtaccagggactcagcaccgccaccaaggacacctatgacgctcttcacatgcaggccctgccgcctcgg

SEQ ID NO: 877 - DNA, 1452 bp, Artificial Sequence
  Description of Artificial Sequence: Synthetic polynucleotide
atggccctccctgtcaccgccctgctgcttccgctggctcttctgctccacgccgctcggcccgaagtgcaattggtggaaactggaggaggacttgtgcaacctggaggatcattgcggctctcatgcgctgtctccggcttcgccctgtcaaatcacgggatgtcgtgggtcagacgggccccgggaaagggtctggaatgggtgtcggggattgtgtacagcggctccacctactacgccgcttcggtcaagggccgcttcactatttcacgggacaacagccgcaacaccctctatctgcaaatgaactctctccgcccggaggataccgccatctactactgctccgcacacggcggcgaatccgacgtgtggggacagggaaccactgtcaccgtgtcgtccgcatccggtggcggaggatcgggtggccgggcctccgggggcggcggcagcgagactaccctgacccagtcccctgccactctgtccgtgagcccgggagagagagccacccttagctgccgggccagccagagcgtgggctccaacctggcctggtaccagcagaagccaggacagggtcccaggctgctgatctacggagcctccactcgcgcgaccggcatccccgcgaggttctccgggtcgggttccgggaccgagttcaccctgaccatctcctccctccaaccggaggacttcgcggtgtactactgtcagcagtacaacgattggctgcccgtgacatttggacaggggacgaaggtggaaatcaaaaccactaccccagcaccgaggccacccaccccggctcctaccatcgcctcccagcctctgtccctgcgtccggaggcatgtagacccgcagctggtggggccgtgcatacccggggtcttgacttcgcctgcgatatctacatttgggcccctctggctggtacttgcggggtcctgctgctttcactcgtgatcactctttactgtaagcgcggtcggaagaagctgctgtacatctttaagcaacccttcatgaggcctgtgcagactactcaagaggaggacggctgttcatgccggttcccagaggaggaggaaggcggctgcgaactgcgcgtgaaattcagccgcagcgcagatgctccagcctacaagcaggggcagaaccagctctacaacgaactcaatcttggtcggagagaggagtacgacgtgctggacaagcggagaggacgggacccagaaatgggcgggaagccgcgcagaaagaatccccaagagggcctgtacaacgagctccaaaaggataagatggcagaagcctatagcgagattggtatgaaaggggaacgcagaagaggcaaaggccacgacggactgtaccagggactcagcaccgccaccaaggacacctatgacgctcttcacatgcaggccctgccgcctcgg

SEQ ID NO: 878 - DNA, 1455 bp, Artificial Sequence
  Description of Artificial Sequence: Synthetic polynucleotide
atggccctccctgtcaccgccctgctgcttccgctggctcttctgctccacgccgctcggcccgaagtgcaattggtggaatctggtggaggacttgtgcaacctggaggatcactgagactgtcatgcgcggtgtccggttttgccctgagcaatcatgggatgtcgtgggtccggcgcgcccccggaaagggtctggaatgggtgtcgggtatcgtctactccgggagcacttactacgccgcgagcgtgaagggccgcttcaccatttcccgcgataactcccgcaacaccctgtacttgcaaatgaactcgctccggcctgaggacactgccatctactactgctccgcacacggaggagaatccgacgtgtggggccagggaactaccgtgaccgtcagcagcgcctccggcggcgggggctcaggcggacgggctagcggcggcggtggctccgagatcgtgctgacccagtcgcctggcactctctcgctgagccccggggaaagggcaaccctgtcctgtcgggccagccagtccattggatcatcctccctcgcctggtatcagcagaaaccgggacaggctccgcggctgcttatgtatggggccagctcaagagcctccggcattcccgaccggttctccgggtccggttccggcaccgatttcaccctgactatctcgaggctggagccagaggacttcgccgtgtactactgccagcagtacgcggggtccccgccgttcacgttcggacagggaaccaaggtcgagatcaagaccactaccccagcaccgaggccacccaccccggctcctaccatcgcctcccagcctctgtccctgcgtccggaggcatgtagacccgcagctggtggggccgtgcatacccggggtcttgacttcgcctgcgatatctacatttgggcccctctggctggtacttgcggggtcctgctgctttcactcgtgatcactctttactgtaagcgcggtcggaagaagctgctgtacatctttaagcaacccttcatgaggcctgtgcagactactcaagaggaggacggctgttcatgccggttcccagaggaggaggaaggcggctgcgaactgcgcgtgaaattcagccgcagcgcagatgctccagcctacaagcaggggcagaaccagctctacaacgaactcaatcttggtcggagagaggagtacgacgtgctggacaagcggagaggacgggacccagaaatgggcgggaagccgcgcagaaagaatccccaagagggcctgtacaacgagctccaaaaggataagatggcagaagcctatagcgagattggtatgaaaggggaacgcagaagaggcaaaggccacgacggactgtaccagggactcagcaccgccaccaaggacacctatgacgctcttcacatgcaggccctgccgcctcgg

SEQ ID NO: 879 - protein, 487 aa, Artificial Sequence
  Description of Artificial Sequence: Synthetic polypeptide
MALPVTALLLPLALLLHAARPQVQLQESGPGLVKPSETLSLTCTVSGGSISSSYYYWGWIRQPPGKGLEWIGSIYYSGSAYYNPSLKSRVTISVDTSKNQFSLRLSSVTAADTAVYYCARHWQEWPDAFDIWGQGTMVTVSSGGGGSGGGGSGGGGSETTLTQSPAFMSATPGDKVIISCKASQDIDDAMNWYQQKPGEAPLFIIQSATSPVPGIPPRFSGSGFGTDFSLTINNIESEDAAYYFCLQHDNFPLTFGQGTKLEIKTTTPAPRPPTPAPTIASQPLSLRPEACRPAAGGAVHTRGLDFACDIYIWAPLAGTCGVLLLSLVITLYCKRGRKKLLYIFKQPFMRPVQTTQEEDGCSCRFPEEEEGGCELRVKFSRSADAPAYKQGQNQLYNELNLGRREEYDVLDKRRGRDPEMGGKPRRKNPQEGLYNELQKDKMAEAYSEIGMKGERRRGKGHDGLYQGLSTATKDTYDALHMQALPPR

SEQ ID NO: 880 - protein, 489 aa, Artificial Sequence
  Description of Artificial Sequence: Synthetic polypeptide
MALPVTALLLPLALLLHAARPQVNLRESGPALVKPTQTLTLTCTFSGFSLRTSGMCVSWIRQPPGKALEWLARIDWDEDKFYSTSLKTRLTISKDTSDNQVVLRMTNMDPADTATYYCARSGAGGTSATAFDIWGPGTMVTVSSGGGGSGGGGSGGGGSDIQMTQSPSSLSASVGDRVTITCRASQDIYNNLAWFQLKPGSAPRSLMYAANKSQSGVPSRFSGSASGTDFTLTISSLQPEDFATYYCQHYYRFPYSFGQGTKLEIKTTTPAPRPPTPAPTIASQPLSLRPEACRPAAGGAVHTRGLDFACDIYIWAPLAGTCGVLLLSLVITLYCKRGRKKLLYIFKQPFMRPVQTTQEEDGCSCRFPEEEEGGCELRVKFSRSADAPAYKQGQNQLYNELNLGRREEYDVLDKRRGRDPEMGGKPRRKNPQEGLYNELQKDKMAEAYSEIGMKGERRRGKGHDGLYQGLSTATKDTYDALHMQALPPR

SEQ ID NO: 881 - protein, 490 aa, Artificial Sequence
  Description of Artificial Sequence: Synthetic polypeptide
MALPVTALLLPLALLLHAARPEVQLVESGGGLVKPGGSLRLSCAASGFTFSSYSMNWVRQAPGKGLEWVSSISSSSSYIYYADSVKGRFTISRDNAKNSLYLQMNSLRAEDTAVYYCAKTIAAVYAFDIWGQGTTVTVSSGGGGSGGGGSGGGGSEIVLTQSPLSLPVTPEEPASISCRSSQSLLHSNGYNYLDWYLQKPGQSPQLLIYLGSNRASGVPDRFSGSGSGTDFTLKISRVEAEDVGVYYCMQALQTPYTFGQGTKLEIKTTTPAPRPPTPAPTIASQPLSLRPEACRPAAGGAVHTRGLDFACDIYIWAPLAGTCGVLLLSLVITLYCKRGRKKLLYIFKQPFMRPVQTTQEEDGCSCRFPEEEEGGCELRVKFSRSADAPAYKQGQNQLYNELNLGRREEYDVLDKRRGRDPEMGGKPRRKNPQEGLYNELQKDKMAEAYSEIGMKGERRRGKGHDGLYQGLSTATKDTYDALHMQALPPR

SEQ ID NO: 882 - protein, 484 aa, Artificial Sequence
  Description of Artificial Sequence: Synthetic polypeptide
MALPVTALLLPLALLLHAARPEVQLVESGGGLVKPGGSLRLSCAASGFTFSDYYMSWIRQAPGKGLEWVSYISSSGSTIYYADSVKGRFTISRDNAKNSLYLQMNSLRAEDTAVYYCARDLRGAFDIWGQGTMVTVSSGGGGSGGGGSGGGGSSYVLTQSPSVSAAPGYTATISCGGNNIGTKSVHWYQQKPGQAPLLVIRDDSVRPSKIPGRFSGSNSGNMATLTISGVQAGDEADFYCQVWDSDSEHVVFGGGTKLTVLTTTPAPRPPTPAPTIASQPLSLRPEACRPAAGGAVHTRGLDFACDIYIWAPLAGTCGVLLLSLVITLYCKRGRKKLLYIFKQPFMRPVQTTQEEDGCSCRFPEEEEGGCELRVKFSRSADAPAYKQGQNQLYNELNLGRREEYDVLDKRRGRDPEMGGKPRRKNPQEGLYNELQKDKMAEAYSEIGMKGERRRGKGHDGLYQGLSTATKDTYDALHMQALPPR

SEQ ID NO: 883 - protein, 485 aa, Artificial Sequence
  Description of Artificial Sequence: Synthetic polypeptide
MALPVTALLLPLALLLHAARPQVQLVQSGAEVKKPGASVKVSCKPSGYTVTSHYIHWVRRAPGQGLEWMGMINPSGGVTAYSQTLQGRVTMTSDTSSSTVYMELSSLRSEDTAMYYCAREGSGSGWYFDFWGRGTLVTVSSGGGGSGGGGSGGGGSSYVLTQPPSVSVSPGQTASITCSGDGLSKKYVSWYQQKAGQSPVVLISRDKERPSGIPDRFSGSNSADTATLTISGTQAMDEADYYCQAWDDTTVVFGGGTKLTVLTTTPAPRPPTPAPTIASQPLSLRPEACRPAAGGAVHTRGLDFACDIYIWAPLAGTCGVLLLSLVITLYCKRGRKKLLYIFKQPFMRPVQTTQEEDGCSCRFPEEEEGGCELRVKFSRSADAPAYKQGQNQLYNELNLGRREEYDVLDKRRGRDPEMGGKPRRKNPQEGLYNELQKDKMAEAYSEIGMKGERRRGKGHDGLYQGLSTATKDTYDALHMQALPPR

SEQ ID NO: 884 - protein, 489 aa, Artificial Sequence
  Description of Artificial Sequence: Synthetic polypeptide
MALPVTALLLPLALLLHAARPQVQLQESGPGLVKPSQTLSLTCTVSGGSISSGGYYWSWIRQHPGKGLEWIGYIYYSGSTYYNPSLKSRVTISVDTSKNQFSLKLSSVTAADTAVYYCARAGIAARLRGAFDIWGQGTMVTVSSGGGGSGGGGSGGGGSDIVMTQSPSSVSASVGDRVIITCRASQGIRNWLAWYQQKPGKAPNLLIYAASNLQSGVPSRFSGSGSGADFTLTISSLQPEDVATYYCQKYNSAPFTFGPGTKVDIKTTTPAPRPPTPAPTIASQPLSLRPEACRPAAGGAVHTRGLDFACDIYIWAPLAGTCGVLLLSLVITLYCKRGRKKLLYIFKQPFMRPVQTTQEEDGCSCRFPEEEEGGCELRVKFSRSADAPAYKQGQNQLYNELNLGRREEYDVLDKRRGRDPEMGGKPRRKNPQEGLYNELQKDKMAEAYSEIGMKGERRRGKGHDGLYQGLSTATKDTYDALHMQALPPR

SEQ ID NO: 885 - protein, 497 aa, Artificial Sequence
  Description of Artificial Sequence: Synthetic polypeptide
MALPVTALLLPLALLLHAARPQVQLVQSGAEVKKPGSSVKVSCKASGGTFSSYAISWVRQAPGQGLEWMGGIIPIFGTANYAQKFQGRVTITADESTSTAYMELSSLRSEDTAVYYCARRGGYQLLRWDVGLLRSAFDIWGQGTMVTVSSGGGGSGGGGSGGGGSSYVLTQPPSVSVAPGQTARITCGGNNIGSKSVHWYQQKPGQAPVLVLYGKNNRPSGVPDRFSGSRSGTTASLTITGAQAEDEADYYCSSRDSSGDHLRVFGTGTKVTVLTTTPAPRPPTPAPTIASQPLSLRPEACRPAAGGAVHTRGLDFACDIYIWAPLAGTCGVLLLSLVITLYCKRGRKKLLYIFKQPFMRPVQTTQEEDGCSCRFPEEEEGGCELRVKFSRSADAPAYKQGQNQLYNELNLGRREEYDVLDKRRGRDPEMGGKPRRKNPQEGLYNELQKDKMAEAYSEIGMKGERRRGKGHDGLYQGLSTATKDTYDALHMQALPPR

SEQ ID NO: 886 - protein, 492 aa, Artificial Sequence
  Description of Artificial Sequence: Synthetic polypeptide
MALPVTALLLPLALLLHAARPEVQLQQSGPGLVKPSQTLSLTCAISGDSVSSNSAAWNWIRQSPSRGLEWLGRTYYRSKWYSFYAISLKSRIIINPDTSKNQFSLQLKSVTPEDTAVYYCARSSPEGLFLYWFDPWGQGTLVTVSSGGDGSGGGGSGGGGSSSELTQDPAVSVALGQTIRITCQGDSLGNYYATWYQQKPGQAPVLVIYGTNNRPSGIPDRFSASSSGNTASLTITGAQAEDEADYYCNSRDSSGHHLLFGTGTKVTVLTTTPAPRPPTPAPTIASQPLSLRPEACRPAAGGAVHTRGLDFACDIYIWAPLAGTCGVLLLSLVITLYCKRGRKKLLYIFKQPFMRPVQTTQEEDGCSCRFPEEEEGGCELRVKFSRSADAPAYKQGQNQLYNELNLGRREEYDVLDKRRGRDPEMGGKPRRKNPQEGLYNELQKDKMAEAYSEIGMKGERRRGKGHDGLYQGLSTATKDTYDALHMQALPPR

SEQ ID NO: 887 - protein, 490 aa, Artificial Sequence
  Description of Artificial Sequence: Synthetic polypeptide
MALPVTALLLPLALLLHAARPEVQLVESGGGLVQPGGSLRLSCAASGFTFSSYAMSWVRQAPGKGLEWVSAISGSGGSTYYADSVKGRFTISRDNSKNTLYLQMNSLRAEDTAVYYCAKVEGSGSLDYWGQGTLVTVSSGGGGSGGGGSGGGGSEIVMTQSPGTLSLSPGERATLSCRASQSVSSAYLAWYQQKPGQPPRLLISGASTRATGIPDRFGGSGSGTDFTLTISRLEPEDFAVYYCQHYGSSFNGSSLFTFGQGTRLEIKTTTPAPRPPTPAPTIASQPLSLRPEACRPAAGGAVHTRGLDFACDIYIWAPLAGTCGVLLLSLVITLYCKRGRKKLLYIFKQPFMRPVQTTQEEDGCSCRFPEEEEGGCELRVKFSRSADAPAYKQGQNQLYNELNLGRREEYDVLDKRRGRDPEMGGKPRRKNPQEGLYNELQKDKMAEAYSEIGMKGERRRGKGHDGLYQGLSTATKDTYDALHMQALPPR

SEQ ID NO: 888 - protein, 485 aa, Artificial Sequence
  Description of Artificial Sequence: Synthetic polypeptide
MALPVTALLLPLALLLHAARPEVQLVETGGGLVQPGGSLRLSCAASGITFSRYPMSWVRQAPGKGLEWVSGISDSGVSTYYADSAKGRFTISRDNSKNTLFLQMSSLRDEDTAVYYCVTRAGSEASDIWGQGTMVTVSSGGGGSGGGGSGGGGSEIVLTQSPATLSLSPGERATLSCRASQSVSNSLAWYQQKPGQAPRLLIYDASSRATGIPDRFSGSGSGTDFTLTISRLEPEDFAIYYCQQFGTSSGLTFGGGTKLEIKTTTPAPRPPTPAPTIASQPLSLRPEACRPAAGGAVHTRGLDFACDIYIWAPLAGTCGVLLLSLVITLYCKRGRKKLLYIFKQPFMRPVQTTQEEDGCSCRFPEEEEGGCELRVKFSRSADAPAYKQGQNQLYNELNLGRREEYDVLDKRRGRDPEMGGKPRRKNPQEGLYNELQKDKMAEAYSEIGMKGERRRGKGHDGLYQGLSTATKDTYDALHMQALPPR

SEQ ID NO: 889 - protein, 492 aa, Artificial Sequence
  Description of Artificial Sequence: Synthetic polypeptide
MALPVTALLLPLALLLHAARPQVQLVESGGGLVQPGGSLRLSCAASGFTFSSYAMSWVRQAPGKGLEWVSAISGSGGSTYYADSVKGRFTISRDNAKNSLYLQMNSLRAEDTAIYYCARATYKRELRYYYGMDVWGQGTMVTVSSGGGGSGGGGSGGGGSEIVMTQSPGTVSLSPGERATLSCRASQSVSSSFLAWYQQKPGQAPRLLIYGASSRATGIPDRFSGSGSGTDFTLTISRLEPEDSAVYYCQQYHSSPSWTFGQGTRLEIKTTTPAPRPPTPAPTIASQPLSLRPEACRPAAGGAVHTRGLDFACDIYIWAPLAGTCGVLLLSLVITLYCKRGRKKLLYIFKQPFMRPVQTTQEEDGCSCRFPEEEEGGCELRVKFSRSADAPAYKQGQNQLYNELNLGRREEYDVLDKRRGRDPEMGGKPRRKNPQEGLYNELQKDKMAEAYSEIGMKGERRRGKGHDGLYQGLSTATKDTYDALHMQALPPR

SEQ ID NO: 890 - protein, 492 aa, Artificial Sequence
  Description of Artificial Sequence: Synthetic polypeptide
MALPVTALLLPLALLLHAARPEVQLVETGGGLVQPGGSLRLSCAASGFTFSSYAMSWVRQAPGKGLEWVSAISGSGGSTYYADSVKGRFTISRDNSKNTLYLQMNTLKAEDTAVYYCARATYKRELRYYYGMDVWGQGTTVTVSSGGGGSGGGGSGGGGSEIVLTQSPSTLSLSPGESATLSCRASQSVSTTFLAWYQQKPGQAPRLLIYGSSNRATGIPDRFSGSGSGTDFTLTIRRLEPEDFAVYYCQQYHSSPSWTFGQGTKVEIKTTTPAPRPPTPAPTIASQPLSLRPEACRPAAGGAVHTRGLDFACDIYIWAPLAGTCGVLLLSLVITLYCKRGRKKLLYIFKQPFMRPVQTTQEEDGCSCRFPEEEEGGCELRVKFSRSADAPAYKQGQNQLYNELNLGRREEYDVLDKRRGRDPEMGGKPRRKNPQEGLYNELQKDKMAEAYSEIGMKGERRRGKGHDGLYQGLSTATKDTYDALHMQALPPR

SEQ ID NO: 891 - protein, 483 aa, Artificial Sequence
  Description of Artificial Sequence: Synthetic polypeptide
MALPVTALLLPLALLLHAARPEVQLVETGGGLVQPGRSLRLSCAASGFTFDDYAMHWVRQAPGKGLEWVSGISWNSGSIGYADSVKGRFTISRDNAKNSLYLQMNSLRDEDTAVYYCARVGKAVPDVWGQGTTVTVSSGGGGSGGGGSGGGGSDIVMTQTPSSLSASVGDRVTITCRASQSISSYLNWYQQKPGKAPKLLIYAASSLQSGVPSRFSGSGSGTDFTLTISSLQPEDFATYYCQQSYSTPYSFGQGTRLEIKTTTPAPRPPTPAPTIASQPLSLRPEACRPAAGGAVHTRGLDFACDIYIWAPLAGTCGVLLLSLVITLYCKRGRKKLLYIFKQPFMRPVQTTQEEDGCSCRFPEEEEGGCELRVKFSRSADAPAYKQGQNQLYNELNLGRREEYDVLDKRRGRDPEMGGKPRRKNPQEGLYNELQKDKMAEAYSEIGMKGERRRGKGHDGLYQGLSTATKDTYDALHMQALPPR

SEQ ID NO: 892 - protein, 490 aa, Artificial Sequence
  Description of Artificial Sequence: Synthetic polypeptide
MALPVTALLLPLALLLHAARPEVQLVESGGGLVQPGRSLRLSCTASGFTFDDYAMHWVRQRPGKGLEWVASINWKGNSLAYGDSVKGRFAISRDNAKNTVFLQMNSLRTEDTAVYYCASHQGVAYYNYAMDVWGRGTLVTVSSGGGGSGGGGSGGGGSEIVLTQSPGTLSLSPGERATLSCRATQSIGSSFLAWYQQRPGQAPRLLIYGASQRATGIPDRFSGRGSGTDFTLTISRVEPEDSAVYYCQHYESSPSWTFGQGTKVEIKTTTPAPRPPTPAPTIASQPLSLRPEACRPAAGGAVHTRGLDFACDIYIWAPLAGTCGVLLLSLVITLYCKRGRKKLLYIFKQPFMRPVQTTQEEDGCSCRFPEEEEGGCELRVKFSRSADAPAYKQGQNQLYNELNLGRREEYDVLDKRRGRDPEMGGKPRRKNPQEGLYNELQKDKMAEAYSEIGMKGERRRGKGHDGLYQGLSTATKDTYDALHMQALPPR

SEQ ID NO: 893 - protein, 485 aa, Artificial Sequence
  Description of Artificial Sequence: Synthetic polypeptide
MALPVTALLLPLALLLHAARPEVQLVESGGGLVQPGGSLRLSCAASGFTFSSYAMSWVRQAPGKGLEWVSAISGSGGSTYYADSVKGRFTISRDNSKNTLYLQMNSLRAEDTAVYYCAKVVRDGMDVWGQGTTVTVSSGGGGSGGGGSGGGGSEIVLTQSPATLSLSPGERATLSCRASQSVSSSYLAWYQQKPGQAPRLLIYGASSRATGIPDRFSGNGSGTDFTLTISRLEPEDFAVYYCQQYGSPPRFTFGPGTKVDIKTTTPAPRPPTPAPTIASQPLSLRPEACRPAAGGAVHTRGLDFACDIYIWAPLAGTCGVLLLSLVITLYCKRGRKKLLYIFKQPFMRPVQTTQEEDGCSCRFPEEEEGGCELRVKFSRSADAPAYKQGQNQLYNELNLGRREEYDVLDKRRGRDPEMGGKPRRKNPQEGLYNELQKDKMAEAYSEIGMKGERRRGKGHDGLYQGLSTATKDTYDALHMQALPPR

SEQ ID NO: 894 - protein, 486 aa, Artificial Sequence
  Description of Artificial Sequence: Synthetic polypeptide
MALPVTALLLPLALLLHAARPEVQLLESGGGLVQPGGSLRLSCAASGFTFSSYAMSWVRQAPGKGLEWVSAISGSGGSTYYADSVKGRFTISRDNSKNTLYLQMNSLRAEDTAVYYCAKIPQTGTFDYWGQGTLVTVSSGGGGSGGGGSGGGGSEIVLTQSPGTLSLSPGERATLSCRASQSVSSSYLAWYQQRPGQAPRLLIYGASSRATGIPDRFSGSGSGTDFTLTISRLEPEDFAVYYCQHYGSSPSWTFGQGTRLEIKTTTPAPRPPTPAPTIASQPLSLRPEACRPAAGGAVHTRGLDFACDIYIWAPLAGTCGVLLLSLVITLYCKRGRKKLLYIFKQPFMRPVQTTQEEDGCSCRFPEEEEGGCELRVKFSRSADAPAYKQGQNQLYNELNLGRREEYDVLDKRRGRDPEMGGKPRRKNPQEGLYNELQKDKMAEAYSEIGMKGERRRGKGHDGLYQGLSTATKDTYDALHMQALPPR

SEQ ID NO: 895 - protein, 492 aa, Artificial Sequence
  Description of Artificial Sequence: Synthetic polypeptide
MALPVTALLLPLALLLHAARPEVQLVETGGGLVQPGGSLRLSCAASGFTFSSYAMSWVRQAPGKGLEWVSAISGSGGSTYYADSVKGRFTMSRENDKNSVFLQMNSLRVEDTGVYYCARANYKRELRYYYGMDVWGQGTMVTVSSGGGGSGGGGSGGGGSEIVMTQSPGTLSLSPGESATLSCRASQRVASNYLAWYQHKPGQAPSLLISGASSRATGVPDRFSGSGSGTDFTLAISRLEPEDSAVYYCQHYDSSPSWTFGQGTKVEIKTTTPAPRPPTPAPTIASQPLSLRPEACRPAAGGAVHTRGLDFACDIYIWAPLAGTCGVLLLSLVITLYCKRGRKKLLYIFKQPFMRPVQTTQEEDGCSCRFPEEEEGGCELRVKFSRSADAPAYKQGQNQLYNELNLGRREEYDVLDKRRGRDPEMGGKPRRKNPQEGLYNELQKDKMAEAYSEIGMKGERRRGKGHDGLYQGLSTATKDTYDALHMQALPPR

SEQ ID NO: 896 - protein, 488 aa, Artificial Sequence
  Description of Artificial Sequence: Synthetic polypeptide
MALPVTALLLPLALLLHAARPEVQLLETGGGLVQPGGSLRLSCAASGFSFSSYAMSWVRQAPGKGLEWVSAISGSGGSTYYADSVKGRFTISRDNSKNTLYLQMNSLRAEDTAVYYCAKALVGATGAFDIWGQGTLVTVSSGGGGSGGGGSGGGGSEIVLTQSPGTLSLSPGERATLSCRASQSLSSNFLAWYQQKPGQAPGLLIYGASNWATGTPDRFSGSGSGTDFTLTITRLEPEDFAVYYCQYYGTSPMYTFGQGTKVEIKTTTPAPRPPTPAPTIASQPLSLRPEACRPAAGGAVHTRGLDFACDIYIWAPLAGTCGVLLLSLVITLYCKRGRKKLLYIFKQPFMRPVQTTQEEDGCSCRFPEEEEGGCELRVKFSRSADAPAYKQGQNQLYNELNLGRREEYDVLDKRRGRDPEMGGKPRRKNPQEGLYNELQKDKMAEAYSEIGMKGERRRGKGHDGLYQGLSTATKDTYDALHMQALPPR

SEQ ID NO: 897 - protein, 488 aa, Artificial Sequence
  Description of Artificial Sequence: Synthetic polypeptide
MALPVTALLLPLALLLHAARPEVQLLESGGGLVQPGGSLRLSCAASGFTFSSYAMSWVRQAPGKGLEWVSAISGSGGSTYYADSVKGRFTISRDNSKNTLYLQMNSLRAEDTAVYYCVLWFGEGFDPWGQGTLVTVSSGGGGSGGGGSGGGGSDIVLTQSPLSLPVTPGEPASISCRSSQSLLHSNGYNYLDWYLQKPGQSPQLLIYLGSNRASGVPDRFSGSGSGTDFTLKISRVEAEDVGVYYCMQALQTPLTFGGGTKVDIKTTTPAPRPPTPAPTIASQPLSLRPEACRPAAGGAVHTRGLDFACDIYIWAPLAGTCGVLLLSLVITLYCKRGRKKLLYIFKQPFMRPVQTTQEEDGCSCRFPEEEEGGCELRVKFSRSADAPAYKQGQNQLYNELNLGRREEYDVLDKRRGRDPEMGGKPRRKNPQEGLYNELQKDKMAEAYSEIGMKGERRRGKGHDGLYQGLSTATKDTYDALHMQALPPR

SEQ ID NO: 898 - protein, 495 aa, Artificial Sequence
  Description of Artificial Sequence: Synthetic polypeptide
MALPVTALLLPLALLLHAARPQVQLVESGGGLVQPGGSLRLSCAASGFTFSSYAMSWVRQAPGKGLEWVSAISGSGGSTYYADSVKGRFTISRDNSKNTLYLQMNSLRAEDTAVYYCAKVGYDSSGYYRDYYGMDVWGQGTTVTVSSGGGGSGGGGSGGGGSEIVLTQSPGTLSLSPGERATLSCRASQSVSSSYLAWYQQKPGQAPRLLIYGTSSRATGISDRFSGSGSGTDFTLTISRLEPEDFAVYYCQHYGNSPPKFTFGPGTKLEIKTTTPAPRPPTPAPTIASQPLSLRPEACRPAAGGAVHTRGLDFACDIYIWAPLAGTCGVLLLSLVITLYCKRGRKKLLYIFKQPFMRPVQTTQEEDGCSCRFPEEEEGGCELRVKFSRSADAPAYKQGQNQLYNELNLGRREEYDVLDKRRGRDPEMGGKPRRKNPQEGLYNELQKDKMAEAYSEIGMKGERRRGKGHDGLYQGLSTATKDTYDALHMQALPPR

SEQ ID NO: 899 - protein, 490 aa, Artificial Sequence
  Description of Artificial Sequence: Synthetic polypeptide
MALPVTALLLPLALLLHAARPEVQLVESGGGLVQPGGSLRLSCAASGFTFSSYAMSWVRQAPGKGLEWVSAISGSGGSTYYADSVKGRFTISRDNSKNTLYLQMNSLRAEDTAVYYCAKMGWSSGYLGAFDIWGQGTTVTVSSGGGGSGGGGSGGGGSEIVLTQSPGTLSLSPGERATLSCRASQSVASSFLAWYQQKPGQAPRLLIYGASGRATGIPDRFSGSGSGTDFTLTISRLEPEDFAVYYCQHYGGSPRLTFGGGTKVDIKTTTPAPRPPTPAPTIASQPLSLRPEACRPAAGGAVHTRGLDFACDIYIWAPLAGTCGVLLLSLVITLYCKRGRKKLLYIFKQPFMRPVQTTQEEDGCSCRFPEEEEGGCELRVKFSRSADAPAYKQGQNQLYNELNLGRREEYDVLDKRRGRDPEMGGKPRRKNPQEGLYNELQKDKMAEAYSEIGMKGERRRGKGHDGLYQGLSTATKDTYDALHMQALPPR

SEQ ID NO: 900 - skipped

SEQ ID NO: 901 - DNA, 1461 bp, Artificial Sequence
  Description of Artificial Sequence: Synthetic polynucleotide
atggccctccctgtcaccgccctgctgcttccgctggctcttctgctccacgccgctcggccccaagtgcagcttcaggaaagcggaccgggcctggtcaagccatccgaaactctctccctgacttgcactgtgtctggcggttccatctcatcgtcgtactactactggggctggattaggcagccgcccggaaagggactggagtggatcggaagcatctactattccggctcggcgtactacaaccctagcctcaagtcgagagtgaccatctccgtggatacctccaagaaccagttttccctgcgcctgagctccgtgaccgccgctgacaccgccgtgtactactgtgctcggcattggcaggaatggcccgatgccttcgacatttggggccagggcactatggtcactgtgtcatccgggggtggaggcagcgggggaggagggtccggggggggaggttcagagacaaccttgacccagtcacccgcattcatgtccgccactccgggagacaaggtcatcatctcgtgcaaagcgtcccaggatatcgacgatgccatgaattggtaccagcagaagcctggcgaagcgccgctgttcattatccaatccgcaacctcgcccgtgcctggaatcccaccgcggttcagcggcagcggtttcggaaccgacttttccctgaccattaacaacattgagtccgaggacgccgcctactacttctgcctgcaacacgacaacttccctctcacgttcggccagggaaccaagctggaaatcaagaccactaccccagcaccgaggccacccaccccggctcctaccatcgcctcccagcctctgtccctgcgtccggaggcatgtagacccgcagctggtggggccgtgcatacccggggtcttgacttcgcctgcgatatctacatttgggcccctctggctggtacttgcggggtcctgctgctttcactcgtgatcactctttactgtaagcgcggtcggaagaagctgctgtacatctttaagcaacccttcatgaggcctgtgcagactactcaagaggaggacggctgttcatgccggttcccagaggaggaggaaggcggctgcgaactgcgcgtgaaattcagccgcagcgcagatgctccagcctacaagcaggggcagaaccagctctacaacgaactcaatcttggtcggagagaggagtacgacgtgctggacaagcggagaggacgggacccagaaatgggcgggaagccgcgcagaaagaatccccaagagggcctgtacaacgagctccaaaaggataagatggcagaagcctatagcgagattggtatgaaaggggaacgcagaagaggcaaaggccacgacggactgtaccagggactcagcaccgccaccaaggacacctatgacgctcttcacatgcaggccctgccgcctcgg

SEQ ID NO: 902 - DNA, 1467 bp, Artificial Sequence
  Description of Artificial Sequence: Synthetic polynucleotide
atggccctccctgtcaccgccctgctgcttccgctggctcttctgctccacgccgctcggccccaagtcaatctgcgcgaatccggccccgccttggtcaagcctacccagaccctcactctgacctgtactttctccggcttctccctgcggacttccgggatgtgcgtgtcctggatcagacagcctccgggaaaggccctggagtggctcgctcgcattgactgggatgaggacaagttctactccacctcactcaagaccaggctgaccatcagcaaagatacctctgacaaccaagtggtgctccgcatgaccaacatggacccagccgacactgccacttactactgcgcgaggagcggagcgggcggaacctccgccaccgccttcgatatttggggcccgggtaccatggtcaccgtgtcaagcggaggaggggggtccgggggcggcggttccgggggaggcggatcggacattcagatgactcagtcaccatcgtccctgagcgctagcgtgggcgacagagtgacaatcacttgccgggcatcccaggacatctataacaaccttgcgtggttccagctgaagcctggttccgcaccgcggtcacttatgtacgccgccaacaagagccagtcgggagtgccgtcccggttttccggttcggcctcgggaactgacttcaccctgacgatctccagcctgcaacccgaggatttcgccacctactactgccagcactactaccgctttccctactcgttcggacagggaaccaagctggaaatcaagaccactaccccagcaccgaggccacccaccccggctcctaccatcgcctcccagcctctgtccctgcgtccggaggcatgtagacccgcagctggtggggccgtgcatacccggggtcttgacttcgcctgcgatatctacatttgggcccctctggctggtacttgcggggtcctgctgctttcactcgtgatcactctttactgtaagcgcggtcggaagaagctgctgtacatctttaagcaacccttcatgaggcctgtgcagactactcaagaggaggacggctgttcatgccggttcccagaggaggaggaaggcggctgcgaactgcgcgtgaaattcagccgcagcgcagatgctccagcctacaagcaggggcagaaccagctctacaacgaactcaatcttggtcggagagaggagtacgacgtgctggacaagcggagaggacgggacccagaaatgggcgggaagccgcgcagaaagaatccccaagagggcctgtacaacgagctccaaaaggataagatggcagaagcctatagcgagattggtatgaaaggggaacgcagaagaggcaaaggccacgacggactgtaccagggactcagcaccgccaccaaggacacctatgacgctcttcacatgcaggccctgccgcctcgg

SEQ ID NO: 903 - DNA, 1470 bp, Artificial Sequence
  Description of Artificial Sequence: Synthetic polynucleotide
atggccctccctgtcaccgccctgctgcttccgctggctcttctgctccacgccgctcggcccgaagtgcagcttgtcgaatccggggggggactggtcaagccgggcggatcactgagactgtcctgcgccgcgagcggcttcacgttctcctcctactccatgaactgggtccgccaagcccccgggaagggactggaatgggtgtcctctatctcctcgtcgtcgtcctacatctactacgccgactccgtgaagggaagattcaccatttcccgcgacaacgcaaagaactcactgtacttgcaaatgaactcactccgggccgaagatactgctgtgtactattgcgccaagactattgccgccgtctacgctttcgacatctggggccagggaaccaccgtgactgtgtcgtccggtggtggtggctcgggcggaggaggaagcggcggcggggggtccgagattgtgctgacccagtcgccactgagcctccctgtgacccccgaggaacccgccagcatcagctgccggtccagccagtccctgctccactccaacggatacaattacctcgattggtaccttcagaagcctggacaaagcccgcagctgctcatctacttgggatcaaaccgcgcgtcaggagtgcctgaccggttctccggctcgggcagcggtaccgatttcaccctgaaaatctccagggtggaggcagaggacgtgggagtgtattactgtatgcaggcgctgcagactccgtacacatttgggcagggcaccaagctggagatcaagaccactaccccagcaccgaggccacccaccccggctcctaccatcgcctcccagcctctgtccctgcgtccggaggcatgtagacccgcagctggtggggccgtgcatacccggggtcttgacttcgcctgcgatatctacatttgggcccctctggctggtacttgcggggtcctgctgctttcactcgtgatcactctttactgtaagcgcggtcggaagaagctgctgtacatctttaagcaacccttcatgaggcctgtgcagactactcaagaggaggacggctgttcatgccggttcccagaggaggaggaaggcggctgcgaactgcgcgtgaaattcagccgcagcgcagatgctccagcctacaagcaggggcagaaccagctctacaacgaactcaatcttggtcggagagaggagtacgacgtgctggacaagcggagaggacgggacccagaaatgggcgggaagccgcgcagaaagaatccccaagagggcctgtacaacgagctccaaaaggataagatggcagaagcctatagcgagattggtatgaaaggggaacgcagaagaggcaaaggccacgacggactgtaccagggactcagcaccgccaccaaggacacctatgacgctcttcacatgcaggccctgccgcctcgg

SEQ ID NO: 904 - DNA, 1452 bp, Artificial Sequence
  Description of Artificial Sequence: Synthetic polynucleotide
atggccctccctgtcaccgccctgctgcttccgctggctcttctgctccacgccgctcggcccgaagtccagctcgtggagtccggcggaggccttgtgaagcctggaggttcgctgagactgtcctgcgccgcctccggcttcaccttctccgactactacatgtcctggatcagacaggccccgggaaagggcctggaatgggtgtcctacatctcgtcatcgggcagcactatctactacgcggactcagtgaaggggcggttcaccatttcccgggataacgcgaagaactcgctgtatctgcaaatgaactcactgagggccgaggacaccgccgtgtactactgcgcccgcgatctccgcggggcatttgacatctggggacagggaaccatggtcacagtgtccagcggagggggaggatcgggtggcggaggttccgggggtggaggctcctcctacgtgctgactcagagcccaagcgtcagcgctgcgcccggttacacggcaaccatctcctgtggcggaaacaacattgggaccaagtctgtgcactggtatcagcagaagccgggccaagctcccctgttggtgatccgcgatgactccgtgcggcctagcaaaattccgggacggttctccggctccaacagcggcaatatggccactctcaccatctcgggagtgcaggccggagatgaagccgacttctactgccaagtctgggactcagactccgagcatgtggtgttcgggggcggaaccaagctgactgtgctcaccactaccccagcaccgaggccacccaccccggctcctaccatcgcctcccagcctctgtccctgcgtccggaggcatgtagacccgcagctggtggggccgtgcatacccggggtcttgacttcgcctgcgatatctacatttgggcccctctggctggtacttgcggggtcctgctgctttcactcgtgatcactctttactgtaagcgcggtcggaagaagctgctgtacatctttaagcaacccttcatgaggcctgtgcagactactcaagaggaggacggctgttcatgccggttcccagaggaggaggaaggcggctgcgaactgcgcgtgaaattcagccgcagcgcagatgctccagcctacaagcaggggcagaaccagctctacaacgaactcaatcttggtcggagagaggagtacgacgtgctggacaagcggagaggacgggacccagaaatgggcgggaagccgcgcagaaagaatccccaagagggcctgtacaacgagctccaaaaggataagatggcagaagcctatagcgagattggtatgaaaggggaacgcagaagaggcaaaggccacgacggactgtaccagggactcagcaccgccaccaaggacacctatgacgctcttcacatgcaggccctgccgcctcgg

SEQ ID NO: 905 - DNA, 1455 bp, Artificial Sequence
  Description of Artificial Sequence: Synthetic polynucleotide
atggccctccctgtcaccgccctgctgcttccgctggctcttctgctccacgccgctcggccccaagtgcagctggtgcagagcggggccgaagtcaagaagccgggagcctccgtgaaagtgtcctgcaagccttcgggatacaccgtgacctcccactacattcattgggtccgccgcgcccccggccaaggactcgagtggatgggcatgatcaaccctagcggcggagtgaccgcgtacagccagacgctgcagggacgcgtgactatgacctcggatacctcctcctccaccgtctatatggaactgtccagcctgcggtccgaggataccgccatgtactactgcgcccgggaaggatcaggctccgggtggtatttcgacttctggggaagaggcaccctcgtgactgtgtcatctgggggagggggttccggtggtggcggatcgggaggaggcggttcatcctacgtgctgacccagccaccctccgtgtccgtgagccccggccagactgcatcgattacatgtagcggcgacggcctctccaagaaatacgtgtcgtggtaccagcagaaggccggacagagcccggtggtgctgatctcaagagataaggagcggcctagcggaatcccggacaggttctcgggttccaactccgcggacactgctactctgaccatctcggggacccaggctatggacgaagccgattactactgccaagcctgggacgacactactgtcgtgtttggagggggcaccaagttgaccgtccttaccactaccccagcaccgaggccacccaccccggctcctaccatcgcctcccagcctctgtccctgcgtccggaggcatgtagacccgcagctggtggggccgtgcatacccggggtcttgacttcgcctgcgatatctacatttgggcccctctggctggtacttgcggggtcctgctgctttcactcgtgatcactctttactgtaagcgcggtcggaagaagctgctgtacatctttaagcaacccttcatgaggcctgtgcagactactcaagaggaggacggctgttcatgccggttcccagaggaggaggaaggcggctgcgaactgcgcgtgaaattcagccgcagcgcagatgctccagcctacaagcaggggcagaaccagctctacaacgaactcaatcttggtcggagagaggagtacgacgtgctggacaagcggagaggacgggacccagaaatgggcgggaagccgcgcagaaagaatccccaagagggcctgtacaacgagctccaaaaggataagatggcagaagcctatagcgagattggtatgaaaggggaacgcagaagaggcaaaggccacgacggactgtaccagggactcagcaccgccaccaaggacacctatgacgctcttcacatgcaggccctgccgcctcgg

SEQ ID NO: 906 - DNA, 1467 bp, Artificial Sequence
  Description of Artificial Sequence: Synthetic polynucleotide
atggccctccctgtcaccgccctgctgcttccgctggctcttctgctccacgccgctcggccccaagtgcagcttcaggagagcggcccgggactcgtgaagccgtcccagaccctgtccctgacttgcaccgtgtcgggaggaagcatctcgagcggaggctactattggtcgtggattcggcagcaccctggaaagggcctggaatggatcggctacatctactactccggctcgacctactacaacccatcgctgaagtccagagtgacaatctcagtggacacgtccaagaatcagttcagcctgaagctctcttccgtgactgcggccgacaccgccgtgtactactgcgcacgcgctggaattgccgcccggctgaggggtgccttcgacatttggggacagggcaccatggtcaccgtgtcctccggcggcggaggttccgggggtggaggctcaggaggaggggggtccgacatcgtcatgactcagtcgccctcaagcgtcagcgcgtccgtcggggacagagtgatcatcacctgtcgggcgtcccagggaattcgcaactggctggcctggtatcagcagaagcccggaaaggcccccaacctgttgatctacgccgcctcaaacctccaatccggggtgccgagccgcttcagcggctccggttcgggtgccgatttcactctgaccatctcctccctgcaacctgaagatgtggctacctactactgccaaaagtacaactccgcaccttttactttcggaccggggaccaaagtggacattaagaccactaccccagcaccgaggccacccaccccggctcctaccatcgcctcccagcctctgtccctgcgtccggaggcatgtagacccgcagctggtggggccgtgcatacccggggtcttgacttcgcctgcgatatctacatttgggcccctctggctggtacttgcggggtcctgctgctttcactcgtgatcactctttactgtaagcgcggtcggaagaagctgctgtacatctttaagcaacccttcatgaggcctgtgcagactactcaagaggaggacggctgttcatgccggttcccagaggaggaggaaggcggctgcgaactgcgcgtgaaattcagccgcagcgcagatgctccagcctacaagcaggggcagaaccagctctacaacgaactcaatcttggtcggagagaggagtacgacgtgctggacaagcggagaggacgggacccagaaatgggcgggaagccgcgcagaaagaatccccaagagggcctgtacaacgagctccaaaaggataagatggcagaagcctatagcgagattggtatgaaaggggaacgcagaagaggcaaaggccacgacggactgtaccagggactcagcaccgccaccaaggacacctatgacgctcttcacatgcaggccctgccgcctcgg

SEQ ID NO: 907 - DNA, 1491 bp, Artificial Sequence
  Description of Artificial Sequence: Synthetic polynucleotide
atggccctccctgtcaccgccctgctgcttccgctggctcttctgctccacgccgctcggccccaagtgcagctggtccagtcgggcgccgaggtcaagaagcccgggagctctgtgaaagtgtcctgcaaggcctccgggggcacctttagctcctacgccatctcctgggtccgccaagcaccgggtcaaggcctggagtggatggggggaattatccctatcttcggcactgccaactacgcccagaagttccagggacgcgtgaccattaccgcggacgaatccacctccaccgcttatatggagctgtccagcttgcgctcggaagataccgccgtgtactactgcgcccggaggggtggataccagctgctgagatgggacgtgggcctcctgcggtcggcgttcgacatctggggccagggcactatggtcactgtgtccagcggaggaggcggatcgggaggcggcggatcagggggaggcggttccagctacgtgcttactcaacccccttcggtgtccgtggccccgggacagaccgccagaatcacttgcggaggaaacaacattgggtccaagagcgtgcattggtaccagcagaagccaggacaggcccctgtgctggtgctctacgggaagaacaatcggcccagcggagtgccggacaggttctcgggttcacgctccggtacaaccgcttcactgactatcaccggggcccaggcagaggatgaagcggactactactgttcctcccgggattcatccggcgaccacctccgggtgttcggaaccggaacgaaggtcaccgtgctgaccactaccccagcaccgaggccacccaccccggctcctaccatcgcctcccagcctctgtccctgcgtccggaggcatgtagacccgcagctggtggggccgtgcatacccggggtcttgacttcgcctgcgatatctacatttgggcccctctggctggtacttgcggggtcctgctgctttcactcgtgatcactctttactgtaagcgcggtcggaagaagctgctgtacatctttaagcaacccttcatgaggcctgtgcagactactcaagaggaggacggctgttcatgccggttcccagaggaggaggaaggcggctgcgaactgcgcgtgaaattcagccgcagcgcagatgctccagcctacaagcaggggcagaaccagctctacaacgaactcaatcttggtcggagagaggagtacgacgtgctggacaagcggagaggacgggacccagaaatgggcgggaagccgcgcagaaagaatccccaagagggcctgtacaacgagctccaaaaggataagatggcagaagcctatagcgagattggtatgaaaggggaacgcagaagaggcaaaggccacgacggactgtaccagggactcagcaccgccaccaaggacacctatgacgctcttcacatgcaggccctgccgcctcgg

SEQ ID NO: 908 - DNA, 1476 bp, Artificial Sequence
  Description of Artificial Sequence: Synthetic polynucleotide
atggccctccctgtcaccgccctgctgcttccgctggctcttctgctccacgccgctcggcccgaagtgcagctccaacagtcaggaccggggctcgtgaagccatcccagaccctgtccctgacttgtgccatctcgggagatagcgtgtcatcgaactccgccgcctggaactggattcggcagagcccgtcccgcggactggagtggcttggaaggacctactaccggtccaagtggtactctttctacgcgatctcgctgaagtcccgcattatcattaaccctgatacctccaagaatcagttctccctccaactgaaatccgtcacccccgaggacacagcagtgtattactgcgcacggagcagccccgaaggactgttcctgtattggtttgacccctggggccaggggactcttgtgaccgtgtcgagcggcggagatgggtccggtggcggtggttcggggggcggcggatcatcatccgaactgacccaggacccggctgtgtccgtggcgctgggacaaaccatccgcattacgtgccagggagactccctgggcaactactacgccacttggtaccagcagaagccgggccaagcccctgtgttggtcatctacgggaccaacaacagaccttccggcatccccgaccggttcagcgcttcgtcctccggcaacactgccagcctgaccatcactggagcgcaggccgaagatgaggccgactactactgcaacagcagagactcctcgggtcatcacctcttgttcggaactggaaccaaggtcaccgtgctgaccactaccccagcaccgaggccacccaccccggctcctaccatcgcctcccagcctctgtccctgcgtccggaggcatgtagacccgcagctggtggggccgtgcatacccggggtcttgacttcgcctgcgatatctacatttgggcccctctggctggtacttgcggggtcctgctgctttcactcgtgatcactctttactgtaagcgcggtcggaagaagctgctgtacatctttaagcaacccttcatgaggcctgtgcagactactcaagaggaggacggctgttcatgccggttcccagaggaggaggaaggcggctgcgaactgcgcgtgaaattcagccgcagcgcagatgctccagcctacaagcaggggcagaaccagctctacaacgaactcaatcttggtcggagagaggagtacgacgtgctggacaagcggagaggacgggacccagaaatgggcgggaagccgcgcagaaagaatccccaagagggcctgtacaacgagctccaaaaggataagatggcagaagcctatagcgagattggtatgaaaggggaacgcagaagaggcaaaggccacgacggactgtaccagggactcagcaccgccaccaaggacacctatgacgctcttcacatgcaggccctgccgcctcgg

SEQ ID NO: 909 - DNA, 1470 bp, Artificial Sequence
  Description of Artificial Sequence: Synthetic polynucleotide
atggccctccctgtcaccgccctgctgcttccgctggctcttctgctccacgccgctcggcccgaagtgcagctcgtggagtcaggaggcggcctggtccagccgggagggtcccttagactgtcatgcgccgcaagcggattcactttctcctcctatgccatgagctgggtccgccaagcccccggaaagggactggaatgggtgtccgccatctcggggtctggaggctcaacttactacgctgactccgtgaagggacggttcaccattagccgcgacaactccaagaacaccctctacctccaaatgaactccctgcgggccgaggataccgccgtctactactgcgccaaagtggaaggttcaggatcgctggactactggggacagggtactctcgtgaccgtgtcatcgggcggaggaggttccggcggtggcggctccggcggcggagggtcggagatcgtgatgacccagagccctggtactctgagcctttcgccgggagaaagggccaccctgtcctgccgcgcttcccaatccgtgtcctccgcgtacttggcgtggtaccagcagaagccgggacagccccctcggctgctgatcagcggggccagcacccgggcaaccggaatcccagacagattcgggggttccggcagcggcacagatttcaccctgactatttcgaggttggagcccgaggactttgcggtgtattactgtcagcactacgggtcgtcctttaatggctccagcctgttcacgttcggacaggggacccgcctggaaatcaagaccactaccccagcaccgaggccacccaccccggctcctaccatcgcctcccagcctctgtccctgcgtccggaggcatgtagacccgcagctggtggggccgtgcatacccggggtcttgacttcgcctgcgatatctacatttgggcccctctggctggtacttgcggggtcctgctgctttcactcgtgatcactctttactgtaagcgcggtcggaagaagctgctgtacatctttaagcaacccttcatgaggcctgtgcagactactcaagaggaggacggctgttcatgccggttcccagaggaggaggaaggcggctgcgaactgcgcgtgaaattcagccgcagcgcagatgctccagcctacaagcaggggcagaaccagctctacaacgaactcaatcttggtcggagagaggagtacgacgtgctggacaagcggagaggacgggacccagaaatgggcgggaagccgcgcagaaagaatccccaagagggcctgtacaacgagctccaaaaggataagatggcagaagcctatagcgagattggtatgaaaggggaacgcagaagaggcaaaggccacgacggactgtaccagggactcagcaccgccaccaaggacacctatgacgctcttcacatgcaggccctgccgcctcgg

SEQ ID NO: 910 - DNA, 1455 bp, Artificial Sequence
  Description of Artificial Sequence: Synthetic polynucleotide
atggccctccctgtcaccgccctgctgcttccgctggctcttctgctccacgccgctcggcccgaagtgcaactggtggaaaccggtggcggcctggtgcagcctggaggatcattgaggctgtcatgcgcggccagcggtattaccttctcccggtaccccatgtcctgggtcagacaggccccggggaaagggcttgaatgggtgtccgggatctcggactccggtgtcagcacttactacgccgactccgccaagggacgcttcaccatttcccgggacaactcgaagaacaccctgttcctccaaatgagctccctccgggacgaggatactgcagtgtactactgcgtgacccgcgccgggtccgaggcgtctgacatttggggacagggcactatggtcaccgtgtcgtccggcggagggggctcgggaggcggtggcagcggaggaggagggtccgagatcgtgctgacccaatccccggccaccctctcgctgagccctggagaaagggcaaccttgtcctgtcgcgcgagccagtccgtgagcaactccctggcctggtaccagcagaagcccggacaggctccgagacttctgatctacgacgcttcgagccgggccactggaatccccgaccgcttttcggggtccggctcaggaaccgatttcaccctgacaatctcacggctggagccagaggatttcgccatctattactgccagcagttcggtacttcctccggcctgactttcggaggcggcacgaagctcgaaatcaagaccactaccccagcaccgaggccacccaccccggctcctaccatcgcctcccagcctctgtccctgcgtccggaggcatgtagacccgcagctggtggggccgtgcatacccggggtcttgacttcgcctgcgatatctacatttgggcccctctggctggtacttgcggggtcctgctgctttcactcgtgatcactctttactgtaagcgcggtcggaagaagctgctgtacatctttaagcaacccttcatgaggcctgtgcagactactcaagaggaggacggctgttcatgccggttcccagaggaggaggaaggcggctgcgaactgcgcgtgaaattcagccgcagcgcagatgctccagcctacaagcaggggcagaaccagctctacaacgaactcaatcttggtcggagagaggagtacgacgtgctggacaagcggagaggacgggacccagaaatgggcgggaagccgcgcagaaagaatccccaagagggcctgtacaacgagctccaaaaggataagatggcagaagcctatagcgagattggtatgaaaggggaacgcagaagaggcaaaggccacgacggactgtaccagggactcagcaccgccaccaaggacacctatgacgctcttcacatgcaggccctgccgcctcgg

SEQ ID NO: 911 - DNA, 1476 bp, Artificial Sequence
  Description of Artificial Sequence: Synthetic polynucleotide
atggccctccctgtcaccgccctgctgcttccgctggctcttctgctccacgccgctcggccccaagtgcagctcgtggaatcgggtggcggactggtgcagccggggggctcacttagactgtcctgcgcggccagcggattcactttctcctcctacgccatgtcctgggtcagacaggcccctggaaagggcctggaatgggtgtccgcaatcagcggcagcggcggctcgacctattacgcggattcagtgaagggcagattcaccatttcccgggacaacgccaagaactccttgtaccttcaaatgaactccctccgcgcggaagataccgcaatctactactgcgctcgggccacttacaagagggaactgcgctactactacgggatggacgtctggggccagggaaccatggtcaccgtgtccagcggaggaggaggatcgggaggaggcggtagcgggggtggagggtcggagatcgtgatgacccagtcccccggcactgtgtcgctgtcccccggcgaacgggccaccctgtcatgtcgggccagccagtcagtgtcgtcaagcttcctcgcctggtaccagcagaaaccgggacaagctccccgcctgctgatctacggagccagcagccgggccaccggtattcctgaccggttctccggttcggggtccgggaccgactttactctgactatctctcgcctcgagccagaggactccgccgtgtattactgccagcagtaccactcctccccgtcctggacgttcggacagggcacaaggctggagattaagaccactaccccagcaccgaggccacccaccccggctcctaccatcgcctcccagcctctgtccctgcgtccggaggcatgtagacccgcagctggtggggccgtgcatacccggggtcttgacttcgcctgcgatatctacatttgggcccctctggctggtacttgcggggtcctgctgctttcactcgtgatcactctttactgtaagcgcggtcggaagaagctgctgtacatctttaagcaacccttcatgaggcctgtgcagactactcaagaggaggacggctgttcatgccggttcccagaggaggaggaaggcggctgcgaactgcgcgtgaaattcagccgcagcgcagatgctccagcctacaagcaggggcagaaccagctctacaacgaactcaatcttggtcggagagaggagtacgacgtgctggacaagcggagaggacgggacccagaaatgggcgggaagccgcgcagaaagaatccccaagagggcctgtacaacgagctccaaaaggataagatggcagaagcctatagcgagattggtatgaaaggggaacgcagaagaggcaaaggccacgacggactgtaccagggactcagcaccgccaccaaggacacctatgacgctcttcacatgcaggccctgccgcctcgg

SEQ ID NO: 912 - DNA, 1476 bp, Artificial Sequence
  Description of Artificial Sequence: Synthetic polynucleotide
atggccctccctgtcaccgccctgctgcttccgctggctcttctgctccacgccgctcggcccgaggtgcagcttgtggaaaccggtggcggactggtgcagcccggaggaagcctcaggctgtcctgcgccgcgtccggcttcaccttctcctcgtacgccatgtcctgggtccgccaggcccccggaaagggcctggaatgggtgtccgccatctctggaagcggaggttccacgtactacgcggacagcgtcaagggaaggttcacaatctcccgcgataattcgaagaacactctgtaccttcaaatgaacaccctgaaggccgaggacactgctgtgtactactgcgcacgggccacctacaagagagagctccggtactactacggaatggacgtctggggccagggaactactgtgaccgtgtcctcgggagggggtggctccggggggggcggctccggcggaggcggttccgagattgtgctgacccagtcaccttcaactctgtcgctgtccccgggagagagcgctactctgagctgccgggccagccagtccgtgtccaccaccttcctcgcctggtatcagcagaagccggggcaggcaccacggctcttgatctacgggtcaagcaacagagcgaccggaattcctgaccgcttctcggggagcggttcaggcaccgacttcaccctgactatccggcgcctggaacccgaagatttcgccgtgtattactgtcaacagtaccactcctcgccgtcctggacctttggccaaggaaccaaagtggaaatcaagaccactaccccagcaccgaggccacccaccccggctcctaccatcgcctcccagcctctgtccctgcgtccggaggcatgtagacccgcagctggtggggccgtgcatacccggggtcttgacttcgcctgcgatatctacatttgggcccctctggctggtacttgcggggtcctgctgctttcactcgtgatcactctttactgtaagcgcggtcggaagaagctgctgtacatctttaagcaacccttcatgaggcctgtgcagactactcaagaggaggacggctgttcatgccggttcccagaggaggaggaaggcggctgcgaactgcgcgtgaaattcagccgcagcgcagatgctccagcctacaagcaggggcagaaccagctctacaacgaactcaatcttggtcggagagaggagtacgacgtgctggacaagcggagaggacgggacccagaaatgggcgggaagccgcgcagaaagaatccccaagagggcctgtacaacgagctccaaaaggataagatggcagaagcctatagcgagattggtatgaaaggggaacgcagaagaggcaaaggccacgacggactgtaccagggactcagcaccgccaccaaggacacctatgacgctcttcacatgcaggccctgccgcctcgg

SEQ ID NO: 913 - DNA, 1449 bp, Artificial Sequence
  Description of Artificial Sequence: Synthetic polynucleotide
atggccctccctgtcaccgccctgctgcttccgctggctcttctgctccacgccgctcggcccgaagtgcagctcgtggaaactggaggtggactcgtgcagcctggacggtcgctgcggctgagctgcgctgcatccggcttcaccttcgacgattatgccatgcactgggtcagacaggcgccagggaagggacttgagtgggtgtccggtatcagctggaatagcggctcaatcggatacgcggactccgtgaagggaaggttcaccatttcccgcgacaacgccaagaactccctgtacttgcaaatgaacagcctccgggatgaggacactgccgtgtactactgcgcccgcgtcggaaaagctgtgcccgacgtctggggccagggaaccactgtgaccgtgtccagcggcgggggtggatcgggcggtggagggtccggtggagggggctcagatattgtgatgacccagaccccctcgtccctgtccgcctcggtcggcgaccgcgtgactatcacatgtagagcctcgcagagcatctccagctacctgaactggtatcagcagaagccggggaaggccccgaagctcctgatctacgcggcatcatcactgcaatcgggagtgccgagccggttttccgggtccggctccggcaccgacttcacgctgaccatttcttccctgcaacccgaggacttcgccacttactactgccagcagtcctactccaccccttactccttcggccaaggaaccaggctggaaatcaagaccactaccccagcaccgaggccacccaccccggctcctaccatcgcctcccagcctctgtccctgcgtccggaggcatgtagacccgcagctggtggggccgtgcatacccggggtcttgacttcgcctgcgatatctacatttgggcccctctggctggtacttgcggggtcctgctgctttcactcgtgatcactctttactgtaagcgcggtcggaagaagctgctgtacatctttaagcaacccttcatgaggcctgtgcagactactcaagaggaggacggctgttcatgccggttcccagaggaggaggaaggcggctgcgaactgcgcgtgaaattcagccgcagcgcagatgctccagcctacaagcaggggcagaaccagctctacaacgaactcaatcttggtcggagagaggagtacgacgtgctggacaagcggagaggacgggacccagaaatgggcgggaagccgcgcagaaagaatccccaagagggcctgtacaacgagctccaaaaggataagatggcagaagcctatagcgagattggtatgaaaggggaacgcagaagaggcaaaggccacgacggactgtaccagggactcagcaccgccaccaaggacacctatgacgctcttcacatgcaggccctgccgcctcgg

SEQ ID NO: 914 - DNA, 1470 bp, Artificial Sequence
  Description of Artificial Sequence: Synthetic polynucleotide
atggccctccctgtcaccgccctgctgcttccgctggctcttctgctccacgccgctcggcccgaagtgcagctcgtggagagcgggggaggattggtgcagcccggaaggtccctgcggctctcctgcactgcgtctggcttcaccttcgacgactacgcgatgcactgggtcagacagcgcccgggaaagggcctggaatgggtcgcctcaatcaactggaagggaaactccctggcctatggcgacagcgtgaagggccgcttcgccatttcgcgcgacaacgccaagaacaccgtgtttctgcaaatgaattccctgcggaccgaggataccgctgtgtactactgcgccagccaccagggcgtggcatactataactacgccatggacgtgtggggaagagggacgctcgtcaccgtgtcctccgggggcggtggatcgggtggaggaggaagcggtggcgggggcagcgaaatcgtgctgactcagagcccgggaactctttcactgtccccgggagaacgggccactctctcgtgccgggccacccagtccatcggctcctccttccttgcctggtaccagcagaggccaggacaggcgccccgcctgctgatctacggtgcttcccaacgcgccactggcattcctgaccggttcagcggcagagggtcgggaaccgatttcacactgaccatttcccgggtggagcccgaagattcggcagtctactactgtcagcattacgagtcctccccttcatggaccttcggtcaagggaccaaagtggagatcaagaccactaccccagcaccgaggccacccaccccggctcctaccatcgcctcccagcctctgtccctgcgtccggaggcatgtagacccgcagctggtggggccgtgcatacccggggtcttgacttcgcctgcgatatctacatttgggcccctctggctggtacttgcggggtcctgctgctttcactcgtgatcactctttactgtaagcgcggtcggaagaagctgctgtacatctttaagcaacccttcatgaggcctgtgcagactactcaagaggaggacggctgttcatgccggttcccagaggaggaggaaggcggctgcgaactgcgcgtgaaattcagccgcagcgcagatgctccagcctacaagcaggggcagaaccagctctacaacgaactcaatcttggtcggagagaggagtacgacgtgctggacaagcggagaggacgggacccagaaatgggcgggaagccgcgcagaaagaatccccaagagggcctgtacaacgagctccaaaaggataagatggcagaagcctatagcgagattggtatgaaaggggaacgcagaagaggcaaaggccacgacggactgtaccagggactcagcaccgccaccaaggacacctatgacgctcttcacatgcaggccctgccgcctcgg

SEQ ID NO: 915 - DNA, 1455 bp, Artificial Sequence
  Description of Artificial Sequence: Synthetic polynucleotide
atggccctccctgtcaccgccctgctgcttccgctggctcttctgctccacgccgctcggcccgaggtgcagttggtcgaaagcgggggcgggcttgtgcagcctggcggatcactgcggctgtcctgcgcggcatcaggcttcacgttttcttcctacgccatgtcctgggtgcgccaggcccctggaaagggactggaatgggtgtccgcgatttcggggtccggcgggagcacctactacgccgattccgtgaagggccgcttcactatctcgcgggacaactccaagaacaccctctacctccaaatgaatagcctgcgggccgaggataccgccgtctactattgcgctaaggtcgtgcgcgacggaatggacgtgtggggacagggtaccaccgtgacagtgtcctcggggggaggcggtagcggcggaggaggaagcggtggtggaggttccgagattgtgctgactcaatcacccgcgaccctgagcctgtcccccggcgaaagggccactctgtcctgtcgggccagccaatcagtctcctcctcgtacctggcctggtaccagcagaagccaggacaggctccgagactccttatctatggcgcatcctcccgcgccaccggaatcccggataggttctcgggaaacggatcggggaccgacttcactctcaccatctcccggctggaaccggaggacttcgccgtgtactactgccagcagtacggcagcccgcctagattcactttcggccccggcaccaaagtggacatcaagaccactaccccagcaccgaggccacccaccccggctcctaccatcgcctcccagcctctgtccctgcgtccggaggcatgtagacccgcagctggtggggccgtgcatacccggggtcttgacttcgcctgcgatatctacatttgggcccctctggctggtacttgcggggtcctgctgctttcactcgtgatcactctttactgtaagcgcggtcggaagaagctgctgtacatctttaagcaacccttcatgaggcctgtgcagactactcaagaggaggacggctgttcatgccggttcccagaggaggaggaaggcggctgcgaactgcgcgtgaaattcagccgcagcgcagatgctccagcctacaagcaggggcagaaccagctctacaacgaactcaatcttggtcggagagaggagtacgacgtgctggacaagcggagaggacgggacccagaaatgggcgggaagccgcgcagaaagaatccccaagagggcctgtacaacgagctccaaaaggataagatggcagaagcctatagcgagattggtatgaaaggggaacgcagaagaggcaaaggccacgacggactgtaccagggactcagcaccgccaccaaggacacctatgacgctcttcacatgcaggccctgccgcctcgg

SEQ ID NO: 916 - DNA, 1458 bp, Artificial Sequence
  Description of Artificial Sequence: Synthetic polynucleotide
atggccctccctgtcaccgccctgctgcttccgctggctcttctgctccacgccgctcggcccgaagtgcagctgctggagtccggcggtggattggtgcaaccggggggatcgctcagactgtcctgtgcggcgtcaggcttcaccttctcgagctacgccatgtcatgggtcagacaggcccctggaaagggtctggaatgggtgtccgccatttccgggagcgggggatctacatactacgccgatagcgtgaagggccgcttcaccatttcccgggacaactccaagaacactctctatctgcaaatgaactccctccgcgctgaggacactgccgtgtactactgcgccaaaatccctcagaccggcaccttcgactactggggacaggggactctggtcaccgtcagcagcggtggcggaggttcggggggaggaggaagcggcggcggagggtccgagattgtgctgacccagtcacccggcactttgtccctgtcgcctggagaaagggccaccctttcctgccgggcatcccaatccgtgtcctcctcgtacctggcctggtaccagcagaggcccggacaggccccacggcttctgatctacggagcaagcagccgcgcgaccggtatcccggaccggttttcgggctcgggctcaggaactgacttcaccctcaccatctcccgcctggaacccgaagatttcgctgtgtattactgccagcactacggcagctccccgtcctggacgttcggccagggaactcggctggagatcaagaccactaccccagcaccgaggccacccaccccggctcctaccatcgcctcccagcctctgtccctgcgtccggaggcatgtagacccgcagctggtggggccgtgcatacccggggtcttgacttcgcctgcgatatctacatttgggcccctctggctggtacttgcggggtcctgctgctttcactcgtgatcactctttactgtaagcgcggtcggaagaagctgctgtacatctttaagcaacccttcatgaggcctgtgcagactactcaagaggaggacggctgttcatgccggttcccagaggaggaggaaggcggctgcgaactgcgcgtgaaattcagccgcagcgcagatgctccagcctacaagcaggggcagaaccagctctacaacgaactcaatcttggtcggagagaggagtacgacgtgctggacaagcggagaggacgggacccagaaatgggcgggaagccgcgcagaaagaatccccaagagggcctgtacaacgagctccaaaaggataagatggcagaagcctatagcgagattggtatgaaaggggaacgcagaagaggcaaaggccacgacggactgtaccagggactcagcaccgccaccaaggacacctatgacgctcttcacatgcaggccctgccgcctcgg

SEQ ID NO: 917 - DNA, 1476 bp, Artificial Sequence
  Description of Artificial Sequence: Synthetic polynucleotide
atggccctccctgtcaccgccctgctgcttccgctggctcttctgctccacgccgctcggcccgaagtgcaactggtggaaaccggtggaggactcgtgcagcctggcggcagcctccggctgagctgcgccgcttcgggattcaccttttcctcctacgcgatgtcttgggtcagacaggcccccggaaaggggctggaatgggtgtcagccatctccggctccggcggatcaacgtactacgccgactccgtgaaaggccggttcaccatgtcgcgcgagaatgacaagaactccgtgttcctgcaaatgaactccctgagggtggaggacaccggagtgtactattgtgcgcgcgccaactacaagagagagctgcggtactactacggaatggacgtctggggacagggaactatggtgaccgtgtcatccggtggagggggaagcggcggtggaggcagcgggggcgggggttcagaaattgtcatgacccagtccccgggaactctttccctctcccccggggaatccgcgactttgtcctgccgggccagccagcgcgtggcctcgaactacctcgcatggtaccagcataagccaggccaagccccttccctgctgatttccggggctagcagccgcgccactggcgtgccggataggttctcgggaagcggctcgggtaccgatttcaccctggcaatctcgcggctggaaccggaggattcggccgtgtactactgccagcactatgactcatccccctcctggacattcggacagggcaccaaggtcgagatcaagaccactaccccagcaccgaggccacccaccccggctcctaccatcgcctcccagcctctgtccctgcgtccggaggcatgtagacccgcagctggtggggccgtgcatacccggggtcttgacttcgcctgcgatatctacatttgggcccctctggctggtacttgcggggtcctgctgctttcactcgtgatcactctttactgtaagcgcggtcggaagaagctgctgtacatctttaagcaacccttcatgaggcctgtgcagactactcaagaggaggacggctgttcatgccggttcccagaggaggaggaaggcggctgcgaactgcgcgtgaaattcagccgcagcgcagatgctccagcctacaagcaggggcagaaccagctctacaacgaactcaatcttggtcggagagaggagtacgacgtgctggacaagcggagaggacgggacccagaaatgggcgggaagccgcgcagaaagaatccccaagagggcctgtacaacgagctccaaaaggataagatggcagaagcctatagcgagattggtatgaaaggggaacgcagaagaggcaaaggccacgacggactgtaccagggactcagcaccgccaccaaggacacctatgacgctcttcacatgcaggccctgccgcctcgg

SEQ ID NO: 918 - DNA, 1464 bp, Artificial Sequence
  Description of Artificial Sequence: Synthetic polynucleotide
atggccctccctgtcaccgccctgctgcttccgctggctcttctgctccacgccgctcggcccgaagtgcagctgctcgaaaccggtggagggctggtgcagccagggggctccctgaggctttcatgcgccgctagcggattctccttctcctcttacgccatgtcgtgggtccgccaagcccctggaaaaggcctggaatgggtgtccgcgatttccgggagcggaggttcgacctattacgccgactccgtgaagggccgctttaccatctcccgggataactccaagaacactctgtacctccaaatgaactcgctgagagccgaggacaccgccgtgtattactgcgcgaaggcgctggtcggcgcgactggggcattcgacatctggggacagggaactcttgtgaccgtgtcgagcggaggcggcggctccggcggaggagggagcgggggcggtggttccgaaatcgtgttgactcagtccccgggaaccctgagcttgtcacccggggagcgggccactctctcctgtcgcgcctcccaatcgctctcatccaatttcctggcctggtaccagcagaagcccggacaggccccgggcctgctcatctacggcgcttcaaactgggcaacgggaacccctgatcggttcagcggaagcggatcgggtactgactttaccctgaccatcaccagactggaaccggaggacttcgccgtgtactactgccagtactacggcacctcccccatgtacacattcggacagggtaccaaggtcgagattaagaccactaccccagcaccgaggccacccaccccggctcctaccatcgcctcccagcctctgtccctgcgtccggaggcatgtagacccgcagctggtggggccgtgcatacccggggtcttgacttcgcctgcgatatctacatttgggcccctctggctggtacttgcggggtcctgctgctttcactcgtgatcactctttactgtaagcgcggtcggaagaagctgctgtacatctttaagcaacccttcatgaggcctgtgcagactactcaagaggaggacggctgttcatgccggttcccagaggaggaggaaggcggctgcgaactgcgcgtgaaattcagccgcagcgcagatgctccagcctacaagcaggggcagaaccagctctacaacgaactcaatcttggtcggagagaggagtacgacgtgctggacaagcggagaggacgggacccagaaatgggcgggaagccgcgcagaaagaatccccaagagggcctgtacaacgagctccaaaaggataagatggcagaagcctatagcgagattggtatgaaaggggaacgcagaagaggcaaaggccacgacggactgtaccagggactcagcaccgccaccaaggacacctatgacgctcttcacatgcaggccctgccgcctcgg

SEQ ID NO: 919 - DNA, 1464 bp, Artificial Sequence
  Description of Artificial Sequence: Synthetic polynucleotide
atggccctccctgtcaccgccctgctgcttccgctggctcttctgctccacgccgctcggcccgaagtgcagctgcttgagagcggtggaggtctggtgcagcccgggggatcactgcgcctgtcctgtgccgcgtccggtttcactttctcctcgtacgccatgtcgtgggtcagacaggcaccgggaaagggactggaatgggtgtcagccatttcgggttcggggggcagcacctactacgctgactccgtgaagggccggttcaccatttcccgcgacaactccaagaacaccttgtacctccaaatgaactccctgcgggccgaagataccgccgtgtattactgcgtgctgtggttcggagagggattcgacccgtggggacaaggaacactcgtgactgtgtcatccggcggaggcggcagcggtggcggcggttccggcggcggcggatctgacatcgtgttgacccagtcccctctgagcctgccggtcactcctggcgaaccagccagcatctcctgccggtcgagccagtccctcctgcactccaatgggtacaactacctcgattggtatctgcaaaagccgggccagagcccccagctgctgatctaccttgggtcaaaccgcgcttccggggtgcctgatagattctccgggtccgggagcggaaccgactttaccctgaaaatctcgagggtggaggccgaggacgtcggagtgtactactgcatgcaggcgctccagactcccctgaccttcggaggaggaacgaaggtcgacatcaagaccactaccccagcaccgaggccacccaccccggctcctaccatcgcctcccagcctctgtccctgcgtccggaggcatgtagacccgcagctggtggggccgtgcatacccggggtcttgacttcgcctgcgatatctacatttgggcccctctggctggtacttgcggggtcctgctgctttcactcgtgatcactctttactgtaagcgcggtcggaagaagctgctgtacatctttaagcaacccttcatgaggcctgtgcagactactcaagaggaggacggctgttcatgccggttcccagaggaggaggaaggcggctgcgaactgcgcgtgaaattcagccgcagcgcagatgctccagcctacaagcaggggcagaaccagctctacaacgaactcaatcttggtcggagagaggagtacgacgtgctggacaagcggagaggacgggacccagaaatgggcgggaagccgcgcagaaagaatccccaagagggcctgtacaacgagctccaaaaggataagatggcagaagcctatagcgagattggtatgaaaggggaacgcagaagaggcaaaggccacgacggactgtaccagggactcagcaccgccaccaaggacacctatgacgctcttcacatgcaggccctgccgcctcgg

SEQ ID NO: 920 - DNA, 1485 bp, Artificial Sequence
  Description of Artificial Sequence: Synthetic polynucleotide
atggccctccctgtcaccgccctgctgcttccgctggctcttctgctccacgccgctcggccccaagtgcagctcgtggagtcaggcggaggactggtgcagcccgggggctccctgagactttcctgcgcggcatcgggttttaccttctcctcctatgctatgtcctgggtgcgccaggccccgggaaagggactggaatgggtgtccgcaatcagcggtagcgggggctcaacatactacgccgactccgtcaagggtcgcttcactatttcccgggacaactccaagaataccctgtacctccaaatgaacagcctcagggccgaggatactgccgtgtactactgcgccaaagtcggatacgatagctccggttactaccgggactactacggaatggacgtgtggggacagggcaccaccgtgaccgtgtcaagcggcggaggcggttcaggagggggaggctccggcggtggagggtccgaaatcgtcctgactcagtcgcctggcactctgtcgttgtccccgggggagcgcgctaccctgtcgtgtcgggcgtcgcagtccgtgtcgagctcctacctcgcgtggtaccagcagaagcccggacaggcccctagacttctgatctacggcacttcttcacgcgccaccgggatcagcgacaggttcagcggctccggctccgggaccgacttcaccctgaccattagccggctggagcctgaagatttcgccgtgtattactgccaacactacggaaactcgccgccaaagttcacgttcggacccggaaccaagctggaaatcaagaccactaccccagcaccgaggccacccaccccggctcctaccatcgcctcccagcctctgtccctgcgtccggaggcatgtagacccgcagctggtggggccgtgcatacccggggtcttgacttcgcctgcgatatctacatttgggcccctctggctggtacttgcggggtcctgctgctttcactcgtgatcactctttactgtaagcgcggtcggaagaagctgctgtacatctttaagcaacccttcatgaggcctgtgcagactactcaagaggaggacggctgttcatgccggttcccagaggaggaggaaggcggctgcgaactgcgcgtgaaattcagccgcagcgcagatgctccagcctacaagcaggggcagaaccagctctacaacgaactcaatcttggtcggagagaggagtacgacgtgctggacaagcggagaggacgggacccagaaatgggcgggaagccgcgcagaaagaatccccaagagggcctgtacaacgagctccaaaaggataagatggcagaagcctatagcgagattggtatgaaaggggaacgcagaagaggcaaaggccacgacggactgtaccagggactcagcaccgccaccaaggacacctatgacgctcttcacatgcaggccctgccgcctcgg

SEQ ID NO: 921 - DNA, 1470 bp, Artificial Sequence
  Description of Artificial Sequence: Synthetic polynucleotide
atggccctccctgtcaccgccctgctgcttccgctggctcttctgctccacgccgctcggcccgaagtccaactggtggagtccgggggagggctcgtgcagcccggaggcagccttcggctgtcgtgcgccgcctccgggttcacgttctcatcctacgcgatgtcgtgggtcagacaggcaccaggaaagggactggaatgggtgtccgccattagcggctccggcggtagcacctactatgccgactcagtgaagggaaggttcactatctcccgcgacaacagcaagaacaccctgtacctccaaatgaactctctgcgggccgaggataccgcggtgtactattgcgccaagatgggttggtccagcggatacttgggagccttcgacatttggggacagggcactactgtgaccgtgtcctccgggggtggcggatcgggaggcggcggctcgggtggagggggttccgaaatcgtgttgacccagtcaccgggaaccctctcgctgtccccgggagaacgggctacactgtcatgtagagcgtcccagtccgtggcttcctcgttcctggcctggtaccagcagaagccgggacaggcaccccgcctgctcatctacggagccagcggccgggcgaccggcatccctgaccgcttctccggttccggctcgggcaccgactttactctgaccattagcaggcttgagcccgaggattttgccgtgtactactgccaacactacggggggagccctcgcctgaccttcggaggcggaactaaggtcgatatcaaaaccactaccccagcaccgaggccacccaccccggctcctaccatcgcctcccagcctctgtccctgcgtccggaggcatgtagacccgcagctggtggggccgtgcatacccggggtcttgacttcgcctgcgatatctacatttgggcccctctggctggtacttgcggggtcctgctgctttcactcgtgatcactctttactgtaagcgcggtcggaagaagctgctgtacatctttaagcaacccttcatgaggcctgtgcagactactcaagaggaggacggctgttcatgccggttcccagaggaggaggaaggcggctgcgaactgcgcgtgaaattcagccgcagcgcagatgctccagcctacaagcaggggcagaaccagctctacaacgaactcaatcttggtcggagagaggagtacgacgtgctggacaagcggagaggacgggacccagaaatgggcgggaagccgcgcagaaagaatccccaagagggcctgtacaacgagctccaaaaggataagatggcagaagcctatagcgagattggtatgaaaggggaacgcagaagaggcaaaggccacgacggactgtaccagggactcagcaccgccaccaaggacacctatgacgctcttcacatgcaggccctgccgcctcgg

SEQ ID NO: 922 - protein, 18 aa, Artificial Sequence
  Description of Artificial Sequence: Synthetic peptide
RTYHRSTWYDDYASSVRG

SEQ ID NO: 923 - protein, 18 aa, Artificial Sequence
  Description of Artificial Sequence: Synthetic peptide
RTYHRSTWYDDYASSVRG

SEQ ID NO: 924 - protein, 7 aa, Artificial Sequence
  Description of Artificial Sequence: Synthetic peptide
DVSNRPS

SEQ ID NO: 925 - RNA, 25 nt, Homo sapiens
aaaauguuuuaauguauauguguua

SEQ ID NO: 926 - RNA, 25 nt, Homo sapiens
aaauguuuuaauguauauguguuau

SEQ ID NO: 927 - RNA, 25 nt, Homo sapiens
uuaauguauauguguuaugggucau

SEQ ID NO: 928 - RNA, 25 nt, Homo sapiens
uauuauaauuucuuaaaaucugcug

SEQ ID NO: 929 - RNA, 25 nt, Homo sapiens
uauaauuucuuaaaaucugcugugg

SEQ ID NO: 930 - RNA, 25 nt, Homo sapiens
ucccugaaagaaaaucaguguuucu

SEQ ID NO: 931 - RNA, 25 nt, Homo sapiens
cccugaaagaaaaucaguguuucuu

SEQ ID NO: 932 - RNA, 25 nt, Homo sapiens
cccugacagaagcuacccuauguag

SEQ ID NO: 933 - RNA, 25 nt, Homo sapiens
agcuacccuauguagaggacaaagu

SEQ ID NO: 934 - RNA, 25 nt, Homo sapiens
aaguaggucuucaauaaauauuagu

SEQ ID NO: 935 - RNA, 25 nt, Homo sapiens
auuaguugguuuacugcuuuuccca

SEQ ID NO: 936 - RNA, 25 nt, Homo sapiens
uuacugcuuuucccaaggauacauc

SEQ ID NO: 937 - RNA, 25 nt, Homo sapiens
cugcuuuucccaaggauacaucugg

SEQ ID NO: 938 - RNA, 25 nt, Homo sapiens
ugcuuuucccaaggauacaucugga

SEQ ID NO: 939 - RNA, 25 nt, Homo sapiens
uggagggucugcauuccuuucucau

SEQ ID NO: 940 - RNA, 25 nt, Homo sapiens
acacguaugacaagaugcugccacc

SEQ ID NO: 941 - RNA, 25 nt, Homo sapiens
cguaugacaagaugcugccaccugg

SEQ ID NO: 942 - RNA, 25 nt, Homo sapiens
uggauacagaauagauuuaaugaaa

SEQ ID NO: 943 - RNA, 25 nt, Homo sapiens
acagaauagauuuaaugaaauggcu

SEQ ID NO: 944 - RNA, 25 nt, Homo sapiens
uggcuaggaagucuuucacucuagu

SEQ ID NO: 945 - RNA, 25 nt, Homo sapiens
cuaggaagucuuucacucuaguugg

SEQ ID NO: 946 - RNA, 25 nt, Homo sapiens
agucuuucacucuaguugguggaac

SEQ ID NO: 947 - RNA, 25 nt, Homo sapiens
cacucuaguugguggaacuggcaau

SEQ ID NO: 948 - RNA, 25 nt, Homo sapiens
acucuaguugguggaacuggcaaua

SEQ ID NO: 949 - RNA, 25 nt, Homo sapiens
uugguggaacuggcaauagggugag

SEQ ID NO: 950 - RNA, 25 nt, Homo sapiens
ugguggaacuggcaauagggugaga

SEQ ID NO: 951 - RNA, 25 nt, Homo sapiens
acuggcaauagggugagagggaagc

SEQ ID NO: 952 - RNA, 25 nt, Homo sapiens
aaugagaagacaaaaauuaagaaac

SEQ ID NO: 953 - RNA, 25 nt, Homo sapiens
aagacaaaaauuaagaaacaggaaa

SEQ ID NO: 954 - RNA, 25 nt, Homo sapiens
caaaaauuaagaaacaggaaaagga

SEQ ID NO: 955 - RNA, 25 nt, Homo sapiens
aaaggaaggagcuccaucucuaaua

SEQ ID NO: 956 - RNA, 25 nt, Homo sapiens
ggaaggagcuccaucucuaauaugg

SEQ ID NO: 957 - RNA, 25 nt, Homo sapiens
aucucuaauauggagguagaaaaaa

SEQ ID NO: 958 - RNA, 25 nt, Homo sapiens
ucucuaauauggagguagaaaaaaa

SEQ ID NO: 959 - RNA, 25 nt, Homo sapiens
cuaaaugagacugaagagucccuag

SEQ ID NO: 960 - RNA, 25 nt, Homo sapiens
agacugaagagucccuagaggagaa

SEQ ID NO: 961 - RNA, 25 nt, Homo sapiens
cuccuuccuucugagacuagaaacg

SEQ ID NO: 962 - RNA, 25 nt, Homo sapiens
cuucugagacuagaaacgaggaaag

SEQ ID NO: 963 - RNA, 25 nt, Homo sapiens
aggaaagaggcuacagcuuguauug

SEQ ID NO: 964 - RNA, 25 nt, Homo sapiens
ggaaagaggcuacagcuuguauuga

SEQ ID NO: 965 - RNA, 25 nt, Homo sapiens
uuguauugagggaaaugcaagacug

SEQ ID NO: 966 - RNA, 25 nt, Homo sapiens
ugcaagacugaggagaaaagaaagc

SEQ ID NO: 967 - RNA, 25 nt, Homo sapiens
uuagcaagcuaaaauaagaguagcc

SEQ ID NO: 968 - RNA, 25 nt, Homo sapiens
uaaaauaagaguagccugguguuag

SEQ ID NO: 969 - RNA, 25 nt, Homo sapiens
caacucccugcuccuaguuuccacu

SEQ ID NO: 970 - RNA, 25 nt, Homo sapiens
aacucccugcuccuaguuuccacuu

SEQ ID NO: 971 - RNA, 25 nt, Homo sapiens
acucccugcuccuaguuuccacuug

SEQ ID NO: 972 - RNA, 25 nt, Homo sapiens
uccacuuggggaauccaugugauuu

SEQ ID NO: 973 - RNA, 25 nt, Homo sapiens
ccacuuggggaauccaugugauuuu

SEQ ID NO: 974 - RNA, 25 nt, Homo sapiens
cacuuggggaauccaugugauuuug

SEQ ID NO: 975 - RNA, 25 nt, Homo sapiens
uuggggaauccaugugauuuugggg

SEQ ID NO: 976 - RNA, 25 nt, Homo sapiens
ggcugacccccacccuuuuccccaa

SEQ ID NO: 977 - RNA, 25 nt, Homo sapiens
agcaaauuagcauguaucauccucc

SEQ ID NO: 978 - RNA, 25 nt, Homo sapiens
guaucauccuccuggccacagugau

SEQ ID NO: 979 - RNA, 25 nt, Homo sapiens
auccuccuggccacagugauugguc

SEQ ID NO: 980 - RNA, 25 nt, Homo sapiens
uccuccuggccacagugauugguca

SEQ ID NO: 981 - RNA, 25 nt, Homo sapiens
uccuggccacagugauuggucaggg

SEQ ID NO: 982 - RNA, 25 nt, Homo sapiens
auuggucaggguggacaugugaccc

SEQ ID NO: 983 - RNA, 25 nt, Homo sapiens
cccaggccuaaucagugugaauauu

SEQ ID NO: 984 - RNA, 25 nt, Homo sapiens
ccaggccuaaucagugugaauauua

SEQ ID NO: 985 - RNA, 25 nt, Homo sapiens
auauuagggcuuuugcugagauuuc

SEQ ID NO: 986 - RNA, 25 nt, Homo sapiens
uacaaagaugccuucuuuuucugau

SEQ ID NO: 987 - RNA, 25 nt, Homo sapiens
ccuucuuuuucugauuggacauaaa

SEQ ID NO: 988 - RNA, 25 nt, Homo sapiens
cuucuuuuucugauuggacauaaau

SEQ ID NO: 989 - RNA, 25 nt, Homo sapiens
uucuuuuucugauuggacauaaaug

SEQ ID NO: 990 - RNA, 25 nt, Homo sapiens
cauaaauggggaaaaguguaaucuu

SEQ ID NO: 991 - RNA, 25 nt, Homo sapiens
gggaaaaguguaaucuuaggaaugc

SEQ ID NO: 992 - RNA, 25 nt, Homo sapiens
cuuaggaaugcuggcagccauuaag

SEQ ID NO: 993 - RNA, 25 nt, Homo sapiens
agccauuaaguggcccagacuuaaa

SEQ ID NO: 994 - RNA, 25 nt, Homo sapiens
ugcaacagugagaaaaaagucaguc

SEQ ID NO: 995 - RNA, 25 nt, Homo sapiens
gguauuuagagacauacugaacuac

SEQ ID NO: 996 - RNA, 25 nt, Homo sapiens
guauuuagagacauacugaacuacu

SEQ ID NO: 997 - RNA, 25 nt, Homo sapiens
ugaacuacugggucaagucuucacc

SEQ ID NO: 998 - RNA, 25 nt, Homo sapiens
cuucaccuggagccagcacuaccua

SEQ ID NO: 999 - RNA, 25 nt, Homo sapiens
uuuuuauuuuaagccaguuugaauu

SEQ ID NO: 1000 - RNA, 25 nt, Homo sapiens
acuuagcccauuccuaccuucccac

SEQ ID NO: 1001 - RNA, 25 nt, Homo sapiens
uuccuaccuucccacaggauagcac

SEQ ID NO: 1002 - RNA, 25 nt, Homo sapiens
uccuaccuucccacaggauagcaca

SEQ ID NO: 1003 - RNA, 25 nt, Homo sapiens
ucccacaggauagcacagggaauac

SEQ ID NO: 1004 - RNA, 25 nt, Homo sapiens
caggauagcacagggaauacaggua

SEQ ID NO: 1005 - RNA, 25 nt, Homo sapiens
acagguaaggucacuacagauuuau

SEQ ID NO: 1006 - RNA, 25 nt, Homo sapiens
agauuuauugguuacacuaaagccc

SEQ ID NO: 1007 - RNA, 25 nt, Homo sapiens
gauuuauugguuacacuaaagccca

SEQ ID NO: 1008 - RNA, 25 nt, Homo sapiens
uaaagcccaggguaucaagcugaaa

SEQ ID NO: 1009 - RNA, 25 nt, Homo sapiens
caggguaucaagcugaaaaggucag

SEQ ID NO: 1010 - RNA, 25 nt, Homo sapiens
gcugaaaaggucagaggcagcaacc

SEQ ID NO: 1011 - RNA, 25 nt, Homo sapiens
ggcagcaaccagguacuaaguagac

SEQ ID NO: 1012 - RNA, 25 nt, Homo sapiens
gcagcaaccagguacuaaguagacu

SEQ ID NO: 1013 - RNA, 25 nt, Homo sapiens
cugggugacucagcugucuguacag

SEQ ID NO: 1014 - RNA, 25 nt, Homo sapiens
acucagcugucuguacagaggagaa

SEQ ID NO: 1015 - RNA, 25 nt, Homo sapiens
uguacagaggagaauggacuuccuu

SEQ ID NO: 1016 - RNA, 25 nt, Homo sapiens
gccaaaugagaagcaagugcaaaga

SEQ ID NO: 1017 - RNA, 25 nt, Homo sapiens
ccaaaugagaagcaagugcaaagaa

SEQ ID NO: 1018 - RNA, 25 nt, Homo sapiens
gcaagugcaaagaagggccucuacu

SEQ ID NO: 1019 - RNA, 25 nt, Homo sapiens
ggccucuacuaggcaaaguuaacgu

SEQ ID NO: 1020 - RNA, 25 nt, Homo sapiens
gccucuacuaggcaaaguuaacgua

SEQ ID NO: 1021 - RNA, 25 nt, Homo sapiens
cacucuuccccacagaccuguauca

SEQ ID NO: 1022 - RNA, 25 nt, Homo sapiens
acucuuccccacagaccuguaucau

SEQ ID NO: 1023 - RNA, 25 nt, Homo sapiens
cucuuccccacagaccuguaucaug

SEQ ID NO: 1024 - RNA, 25 nt, Homo sapiens
ucuuccccacagaccuguaucaugg

SEQ ID NO: 1025 - RNA, 25 nt, Homo sapiens
accuguaucauggggguguugcuuu

SEQ ID NO: 1026 - RNA, 25 nt, Homo sapiens
ccuguaucauggggguguugcuuuu

SEQ ID NO: 1027 - RNA, 25 nt, Homo sapiens
uguugcuuuugggucuuuaugcucc

SEQ ID NO: 1028 - RNA, 25 nt, Homo sapiens
guugcuuuugggucuuuaugcuccu

SEQ ID NO: 1029 - RNA, 25 nt, Homo sapiens
uuugggucuuuaugcuccugggaua

SEQ ID NO: 1030 - RNA, 25 nt, Homo sapiens
gcuccuuuaagucuuuauuacccug

SEQ ID NO: 1031 - RNA, 25 nt, Homo sapiens
cagugucuaccucucccuuugccaa

SEQ ID NO: 1032 - RNA, 25 nt, Homo sapiens
cuuugccaaaggaaaagccuccuuu

SEQ ID NO: 1033 - RNA, 25 nt, Homo sapiens
cugcccuugaugacacucacuuuug

SEQ ID NO: 1034 - RNA, 25 nt, Homo sapiens
ugcccuugaugacacucacuuuuga

SEQ ID NO: 1035 - RNA, 25 nt, Homo sapiens
gcccuugaugacacucacuuuugag

SEQ ID NO: 1036 - RNA, 25 nt, Homo sapiens
augacacucacuuuugaggggacca

SEQ ID NO: 1037 - RNA, 25 nt, Homo sapiens
ugacacucacuuuugaggggaccaa

SEQ ID NO: 1038 - RNA, 25 nt, Homo sapiens
aagggaauuuuaucuucugcuucuu

SEQ ID NO: 1039 - RNA, 25 nt, Homo sapiens
uuuaucuucugcuucuuugguaugc

SEQ ID NO: 1040 - RNA, 25 nt, Homo sapiens
uuaucuucugcuucuuugguaugcu

SEQ ID NO: 1041 - RNA, 25 nt, Homo sapiens
ucugcuucuuugguaugcugggaac

SEQ ID NO: 1042 - RNA, 25 nt, Homo sapiens
cugcuucuuugguaugcugggaacc

SEQ ID NO: 1043 - RNA, 25 nt, Homo sapiens
ugcuucuuugguaugcugggaaccg

SEQ ID NO: 1044 - RNA, 25 nt, Homo sapiens
ugggaaccggggccccuuccuccuu

SEQ ID NO: 1045 - RNA, 25 nt, Homo sapiens
ggaaacaguaccaucucccugaccc

SEQ ID NO: 1046 - RNA, 25 nt, Homo sapiens
gaaacaguaccaucucccugacccu

SEQ ID NO: 1047 - RNA, 25 nt, Homo sapiens
cugcccccuuuucagccucucccau

SEQ ID NO: 1048 - RNA, 25 nt, Homo sapiens
ccuuuucagccucucccauuggccc

SEQ ID NO: 1049 - RNA, 25 nt, Homo sapiens
ccccuccugagccccaugucuccca

SEQ ID NO: 1050 - RNA, 25 nt, Homo sapiens
ccccaugucucccaugguaaccuug

SEQ ID NO: 1051 - RNA, 25 nt, Homo sapiens
ugucucccaugguaaccuugaggac

SEQ ID NO: 1052 - RNA, 25 nt, Homo sapiens
gucucccaugguaaccuugaggacu

SEQ ID NO: 1053 - RNA, 25 nt, Homo sapiens
aaccuugaggacugggcagauucca

SEQ ID NO: 1054 - RNA, 25 nt, Homo sapiens
auuccauggcagcugcugacuugag

SEQ ID NO: 1055 - RNA, 25 nt, Homo sapiens
uuccauggcagcugcugacuugaga

SEQ ID NO: 1056 - RNA, 25 nt, Homo sapiens
uccauggcagcugcugacuugagag

SEQ ID NO: 1057 - RNA, 25 nt, Homo sapiens
ccccacuuccaccugacuuuuuucg

SEQ ID NO: 1058 - RNA, 25 nt, Homo sapiens
cccacuuccaccugacuuuuuucga

SEQ ID NO: 1059 - RNA, 25 nt, Homo sapiens
uuucgagggcgcccccguuuccuuu

SEQ ID NO: 1060 - RNA, 25 nt, Homo sapiens
cuauauccugcuuugcugcuuuagc

SEQ ID NO: 1061 - RNA, 25 nt, Homo sapiens
uauccugcuuugcugcuuuagcugg

SEQ ID NO: 1062 - RNA, 25 nt, Homo sapiens
gcuuuagcugguggagccugcccac

SEQ ID NO: 1063 - RNA, 25 nt, Homo sapiens
gagccugcccacuggccucacucac

SEQ ID NO: 1064 - RNA, 25 nt, Homo sapiens
cuguccucuugacacccuugucaug

SEQ ID NO: 1065 - RNA, 25 nt, Homo sapiens
cuugacacccuugucaugugguccu

SEQ ID NO: 1066 - RNA, 25 nt, Homo sapiens
gccuaccucucuguucucugugccc

SEQ ID NO: 1067 - RNA, 25 nt, Homo sapiens
ccuaccucucuguucucugugcccc

SEQ ID NO: 1068 - RNA, 25 nt, Homo sapiens
cuaccucucuguucucugugccccg

SEQ ID NO: 1069 - RNA, 25 nt, Homo sapiens
ugccccggggcugagugaguccccc

SEQ ID NO: 1070 - RNA, 25 nt, Homo sapiens
cccggggcugagugagucccccagg

SEQ ID NO: 1071 - RNA, 25 nt, Homo sapiens
ugagucccccagguggagcucgccc

SEQ ID NO: 1072 - RNA, 25 nt, Homo sapiens
ccccagguggagcucgcccaggccc

SEQ ID NO: 1073 - RNA, 25 nt, Homo sapiens
guggagcucgcccaggcccaggucc

SEQ ID NO: 1074 - RNA, 25 nt, Homo sapiens
cucgcccaggcccagguccaggucc

SEQ ID NO: 1075 - RNA, 25 nt, Homo sapiens
gcccagguccagguccaggcaaagc

SEQ ID NO: 1076 - RNA, 25 nt, Homo sapiens
cagguccaggcaaagcaggaacagu

SEQ ID NO: 1077 - RNA, 25 nt, Homo sapiens
acaguugguaagaucauguuaauga

SEQ ID NO: 1078 - RNA, 25 nt, Homo sapiens
caguugguaagaucauguuaaugau

SEQ ID NO: 1079 - RNA, 25 nt, Homo sapiens
ucauguuaaugaugggcacagcugc

SEQ ID NO: 1080 - RNA, 25 nt, Homo sapiens
cauguuaaugaugggcacagcugcu

SEQ ID NO: 1081 - RNA, 25 nt, Homo sapiens
auguuaaugaugggcacagcugcug

SEQ ID NO: 1082 - RNA, 25 nt, Homo sapiens
uguuaaugaugggcacagcugcugg

SEQ ID NO: 1083 - RNA, 25 nt, Homo sapiens
augggcacagcugcugggggugccc

SEQ ID NO: 1084 - RNA, 25 nt, Homo sapiens
ggggugccccggcccuacuagacag

SEQ ID NO: 1085 - RNA, 25 nt, Homo sapiens
agacagaggcaguguagccacuuuc

SEQ ID NO: 1086 - RNA, 25 nt, Homo sapiens
gacagaggcaguguagccacuuuca

SEQ ID NO: 1087 - RNA, 25 nt, Homo sapiens
acuuucagggcaccugaagaaagcc

SEQ ID NO: 1088 - RNA, 25 nt, Homo sapiens
cuuucagggcaccugaagaaagccu

SEQ ID NO: 1089 - RNA, 25 nt, Homo sapiens
uuucagggcaccugaagaaagccug

SEQ ID NO: 1090 - RNA, 25 nt, Homo sapiens
uucagggcaccugaagaaagccugg

SEQ ID NO: 1091 - RNA, 25 nt, Homo sapiens
cugaagaaagccugggggccagaau

SEQ ID NO: 1092 - RNA, 25 nt, Homo sapiens
aagaaagccugggggccagaauagg

SEQ ID NO: 1093 - RNA, 25 nt, Homo sapiens
ugggggccagaauagguggagagac

SEQ ID NO: 1094 - RNA, 25 nt, Homo sapiens
gggggccagaauagguggagagacu

SEQ ID NO: 1095 - RNA, 25 nt, Homo sapiens
ccagaauagguggagagacugggau

SEQ ID NO: 1096 - RNA, 25 nt, Homo sapiens
gaauagguggagagacugggauugg

SEQ ID NO: 1097 - RNA, 25 nt, Homo sapiens
cugggauuggcggaauuagugagcg

SEQ ID NO: 1098 - RNA, 25 nt, Homo sapiens
ugggauuggcggaauuagugagcga

SEQ ID NO: 1099 - RNA, 25 nt, Homo sapiens
gggauuggcggaauuagugagcgag

SEQ ID NO: 1100 - RNA, 25 nt, Homo sapiens
uggcggaauuagugagcgaggggcc

SEQ ID NO: 1101 - RNA, 25 nt, Homo sapiens
ggcggaauuagugagcgaggggccc

SEQ ID NO: 1102 - RNA, 25 nt, Homo sapiens
gcggaauuagugagcgaggggcccg

SEQ ID NO: 1103 - RNA, 25 nt, Homo sapiens
aauuagugagcgaggggcccgggga

SEQ ID NO: 1104 - RNA, 25 nt, Homo sapiens
agcgaggggcccggggaaggagcag

SEQ ID NO: 1105 - RNA, 25 nt, Homo sapiens
aaggagcagaggcagccgagccacu

SEQ ID NO: 1106 - RNA, 25 nt, Homo sapiens
aggagcagaggcagccgagccacua

SEQ ID NO: 1107 - RNA, 25 nt, Homo sapiens
ccgagccacuagggcauuaaccugc

SEQ ID NO: 1108 - RNA, 25 nt, Homo sapiens
acuagggcauuaaccugcagguuau

SEQ ID NO: 1109 - RNA, 25 nt, Homo sapiens
cauuaaccugcagguuauuggcucc

SEQ ID NO: 1110 - RNA, 25 nt, Homo sapiens
auuaaccugcagguuauuggcuccu

SEQ ID NO: 1111 - RNA, 25 nt, Homo sapiens
uuaaccugcagguuauuggcuccug

SEQ ID NO: 1112 - RNA, 25 nt, Homo sapiens
ucuucuuccgcucuccacgugcgag

SEQ ID NO: 1113 - RNA, 25 nt, Homo sapiens
uuccgcucuccacgugcgagaggac

SEQ ID NO: 1114 - RNA, 25 nt, Homo sapiens
acgugcgagaggaccggccccaguu

SEQ ID NO: 1115 - RNA, 25 nt, Homo sapiens
cgugcgagaggaccggccccaguuc

SEQ ID NO: 1116 - RNA, 25 nt, Homo sapiens
ccccaguucgggcuuccagauccuu

SEQ ID NO: 1117 - RNA, 25 nt, Homo sapiens
caguucgggcuuccagauccuuagg

SEQ ID NO: 1118 - RNA, 25 nt, Homo sapiens
ccuuaggaggcuaaaaaguaaagag

SEQ ID NO: 1119 - RNA, 25 nt, Homo sapiens
cccaagaaacacugauuuucuuuca

SEQ ID NO: 1120 - RNA, 25 nt, Homo sapiens
ucccaagaaacacugauuuucuuuc

SEQ ID NO: 1121 - RNA, 25 nt, Homo sapiens
uaggguagcuucugucagggaaucu

SEQ ID NO: 1122 - RNA, 25 nt, Homo sapiens
ccucuacauaggguagcuucuguca

SEQ ID NO: 1123 - RNA, 25 nt, Homo sapiens
uccucuacauaggguagcuucuguc

SEQ ID NO: 1124 - RNA, 25 nt, Homo sapiens
gaagaccuacuuuguccucuacaua

SEQ ID NO: 1125 - RNA, 25 nt, Homo sapiens
ugaagaccuacuuuguccucuacau

SEQ ID NO: 1126 - RNA, 25 nt, Homo sapiens
augcagacccuccagauguauccuu

SEQ ID NO: 1127 - RNA, 25 nt, Homo sapiens
aaugcagacccuccagauguauccu

SEQ ID NO: 1128 - RNA, 25 nt, Homo sapiens
uguggucaggcggcaccaaugagaa

SEQ ID NO: 1129 - RNA, 25 nt, Homo sapiens
ggaaaaagcuaguucuguggucagg

SEQ ID NO: 1130 - RNA, 25 nt, Homo sapiens
cacggaaaaagcuaguucugugguc

SEQ ID NO: 1131 - RNA, 25 nt, Homo sapiens
gaugucacggaaaaagcuaguucug

SEQ ID NO: 1132 - RNA, 25 nt, Homo sapiens
acugcgggguuuagguuagauguca

SEQ ID NO: 1133 - RNA, 25 nt, Homo sapiens
gucaggacuuaggacugcgggguuu

SEQ ID NO: 1134 - RNA, 25 nt, Homo sapiens
auacgugucaggacuuaggacugcg

SEQ ID NO: 1135 - RNA, 25 nt, Homo sapiens
cauacgugucaggacuuaggacugc

SEQ ID NO: 1136 - RNA, 25 nt, Homo sapiens
ucauacgugucaggacuuaggacug

SEQ ID NO: 1137 - RNA, 25 nt, Homo sapiens
caucuugucauacgugucaggacuu

SEQ ID NO: 1138 - RNA, 25 nt, Homo sapiens
guggcagcaucuugucauacguguc

SEQ ID NO: 1139 - RNA, 25 nt, Homo sapiens
uuaaaucuauucuguauccaccagg

SEQ ID NO: 1140 - RNA, 25 nt, Homo sapiens
ucauuaaaucuauucuguauccacc

SEQ ID NO: 1141 - RNA, 25 nt, Homo sapiens
uuuuuuucuaccuccauauuagaga

SEQ ID NO: 1142 - RNA, 25 nt, Homo sapiens
aggagagggaagccauucuccucua

SEQ ID NO: 1143 - RNA, 25 nt, Homo sapiens
aaggagagggaagccauucuccucu

SEQ ID NO: 1144 - RNA, 25 nt, Homo sapiens
guuucuagucucagaaggaaggaga

SEQ ID NO: 1145 - RNA, 25 nt, Homo sapiens
cguuucuagucucagaaggaaggag

SEQ ID NO: 1146 - RNA, 25 nt, Homo sapiens
uuccucguuucuagucucagaagga

SEQ ID NO: 1147 - RNA, 25 nt, Homo sapiens
cucuuuccucguuucuagucucaga

SEQ ID NO: 1148 - RNA, 25 nt, Homo sapiens
aguugcuuggguggccgcuaacacc

SEQ ID NO: 1149 - RNA, 25 nt, Homo sapiens
aacuaggagcagggaguugcuuggg

SEQ ID NO: 1150 - RNA, 25 nt, Homo sapiens
ggaaacuaggagcagggaguugcuu

SEQ ID NO: 1151 - RNA, 25 nt, Homo sapiens
uggaaacuaggagcagggaguugcu

SEQ ID NO: 1152 - RNA, 25 nt, Homo sapiens
uaaccccaaguggaaacuaggagca

SEQ ID NO: 1153 - RNA, 25 nt, Homo sapiens
cuaaccccaaguggaaacuaggagc

SEQ ID NO: 1154 - RNA, 25 nt, Homo sapiens
guguaccuaaccccaaguggaaacu

SEQ ID NO: 1155 - RNA, 25 nt, Homo sapiens
ggguuuuaguguaccuaaccccaag

SEQ ID NO: 1156 - RNA, 25 nt, Homo sapiens
cccccagucggagggguuuuagugu

SEQ ID NO: 1157 - RNA, 25 nt, Homo sapiens
uguuguggaaaccccuuuucccacc

SEQ ID NO: 1158 - RNA, 25 nt, Homo sapiens
cuguuguggaaaccccuuuucccac

SEQ ID NO: 1159 - RNA, 25 nt, Homo sapiens
ccuguuguggaaaccccuuuuccca

SEQ ID NO: 1160 - RNA, 25 nt, Homo sapiens
accuguuguggaaaccccuuuuccc

SEQ ID NO: 1161 - RNA, 25 nt, Homo sapiens
aguaccuguuguggaaaccccuuuu

SEQ ID NO: 1162 - RNA, 25 nt, Homo sapiens
uaguaccuguuguggaaaccccuuu

SEQ ID NO: 1163 - RNA, 25 nt, Homo sapiens
aagauauaguaccuguuguggaaac

SEQ ID NO: 1164 - RNA, 25 nt, Homo sapiens
uaagauauaguaccuguuguggaaa

SEQ ID NO: 1165 - RNA, 25 nt, Homo sapiens
auaagauauaguaccuguuguggaa

SEQ ID NO: 1166 - RNA, 25 nt, Homo sapiens
uacgauuaaacgaauaagauauagu

SEQ ID NO: 1167 - RNA, 25 nt, Homo sapiens
ugggacugguuagugacaccggucc

SEQ ID NO: 1168 - RNA, 25 nt, Homo sapiens
aggugggacugguuagugacaccgg

SEQ ID NO: 1169 - RNA, 25 nt, Homo sapiens
uguacaggugggacugguuagugac

SEQ ID NO: 1170 - RNA, 25 nt, Homo sapiens
ggauuauaagugugacuaauccgga

SEQ ID NO: 1171 - RNA, 25 nt, Homo sapiens
gggauuauaagugugacuaauccgg

SEQ ID NO: 1172 - RNA, 25 nt, Homo sapiens
uuuucgggauuauaagugugacuaa

SEQ ID NO: 1173 - RNA, 25 nt, Homo sapiens
gguaaauacagguuagucuuuuucu

SEQ ID NO: 1174 - RNA, 25 nt, Homo sapiens
cugguaaauucagacccggugaauu

SEQ ID NO: 1175 - RNA, 25 nt, Homo sapiens
uagaagacauccugguaaauucaga

SEQ ID NO: 1176 - RNA, 25 nt, Homo sapiens
guagaagacauccugguaaauucag

SEQ ID NO: 1177 - RNA, 25 nt, Homo sapiens
aaaaagagugacaacguagaagaca

SEQ ID NO: 1178 - RNA, 25 nt, Homo sapiens
ucaucaagucauacagagauuuaug

SEQ ID NO: 1179 - RNA, 25 nt, Homo sapiens
uuucagguauccaucacgaccgagg

SEQ ID NO: 1180 - RNA, 25 nt, Homo sapiens
auugaucuuucagguauccaucacg

SEQ ID NO: 1181 - RNA, 25 nt, Homo sapiens
accaaguacauugaucuuucaggua

SEQ ID NO: 1182 - RNA, 25 nt, Homo sapiens
gaccgaauuuuauuuuuccuaaaua

SEQ ID NO: 1183 - RNA, 25 nt, Homo sapiens
auuaaguuugaccgaauuuuauuuu

SEQ ID NO: 1184 - RNA, 25 nt, Homo sapiens
uuuagugucuuuuggauuaaguuug

SEQ ID NO: 1185 - RNA, 25 nt, Homo sapiens
augaaauauauccaaucccuagaaa

SEQ ID NO: 1186 - RNA, 25 nt, Homo sapiens
cuaaguaugaugaaauauauccaau

SEQ ID NO: 1187 - RNA, 25 nt, Homo sapiens
gcuaaguaugaugaaauauauccaa

SEQ ID NO: 1188 - RNA, 25 nt, Homo sapiens
aaugggcuaaguaugaugaaauaua

SEQ ID NO: 1189 - RNA, 25 nt, Homo sapiens
ugcuauccugugggaagguaggaau

SEQ ID NO: 1190 - RNA, 25 nt, Homo sapiens
gugcuauccugugggaagguaggaa

SEQ ID NO: 1191 - RNA, 25 nt, Homo sapiens
ucccugugcuauccugugggaaggu

SEQ ID NO: 1192 - RNA, 25 nt, Homo sapiens
guauucccugugcuauccuguggga

SEQ ID NO: 1193 - RNA, 25 nt, Homo sapiens
accuguauucccugugcuauccugu

SEQ ID NO: 1194 - RNA, 25 nt, Homo sapiens
uaccuguauucccugugcuauccug

SEQ ID NO: 1195 - RNA, 25 nt, Homo sapiens
ucugaccuuuucagcuugauacccu

SEQ ID NO: 1196 - RNA, 25 nt, Homo sapiens
cucugaccuuuucagcuugauaccc

SEQ ID NO: 1197 - RNA, 25 nt, Homo sapiens
ugagucacccagucuacuuaguacc

SEQ ID NO: 1198 - RNA, 25 nt, Homo sapiens
uucucauuuggcuauucuuuuccua

SEQ ID NO: 1199 - RNA, 25 nt, Homo sapiens
cccuucuuugcacuugcuucucauu

SEQ ID NO: 1200 - RNA, 25 nt, Homo sapiens
ucccuacguuaacuuugccuaguag

SEQ ID NO: 1201 - RNA, 25 nt, Homo sapiens
aacacccccaugauacaggucugug

SEQ ID NO: 1202 - RNA, 25 nt, Homo sapiens
caacacccccaugauacaggucugu

SEQ ID NO: 1203 - RNA, 25 nt, Homo sapiens
gcaacacccccaugauacaggucug

SEQ ID NO: 1204 - RNA, 25 nt, Homo sapiens
cccaaaagcaacacccccaugauac

SEQ ID NO: 1205 - RNA, 25 nt, Homo sapiens
caugugcuucaaaguuccuuauccc

SEQ ID NO: 1206 - RNA, 25 nt, Homo sapiens
gcaccacaggguaauaaagacuuaa

SEQ ID NO: 1207 - RNA, 25 nt, Homo sapiens
agggagagguagacacugcaccaca

SEQ ID NO: 1208 - RNA, 25 nt, Homo sapiens
aagggagagguagacacugcaccac

SEQ ID NO: 1209 - RNA, 25 nt, Homo sapiens
gaggcuuuuccuuuggcaaagggag

SEQ ID NO: 1210 - RNA, 25 nt, Homo sapiens
aaaaggaggcuuuuccuuuggcaaa

SEQ ID NO: 1211 - RNA, 25 nt, Homo sapiens
caaaaggaggcuuuuccuuuggcaa

SEQ ID NO: 1212 - RNA, 25 nt, Homo sapiens
agaagccaaaaggaggcuuuuccuu

SEQ ID NO: 1213 - RNA, 25 nt, Homo sapiens
aucaagggcagcagaagccaaaagg

SEQ ID NO: 1214 - RNA, 25 nt, Homo sapiens
gucaucaagggcagcagaagccaaa

SEQ ID NO: 1215 - RNA, 25 nt, Homo sapiens
uccccucaaaagugagugucaucaa

SEQ ID NO: 1216 - RNA, 25 nt, Homo sapiens
guccccucaaaagugagugucauca

SEQ ID NO: 1217 - RNA, 25 nt, Homo sapiens
aaagaagcagaagauaaaauucccu

SEQ ID NO: 1218 - RNA, 25 nt, Homo sapiens
cuguuuccaaaggaggaaggggccc

SEQ ID NO: 1219 - RNA, 25 nt, Homo sapiens
augguacuguuuccaaaggaggaag

SEQ ID NO: 1220 - RNA, 25 nt, Homo sapiens
gaugguacuguuuccaaaggaggaa

SEQ ID NO: 1221 - RNA, 25 nt, Homo sapiens
agaugguacuguuuccaaaggagga

SEQ ID NO: 1222 - RNA, 25 nt, Homo sapiens
agggagaugguacuguuuccaaagg

SEQ ID NO: 1223 - RNA, 25 nt, Homo sapiens
gucagggagaugguacuguuuccaa

SEQ ID NO: 1224 - RNA, 25 nt, Homo sapiens
caguacuugcccagggucagggaga

SEQ ID NO: 1225 - RNA, 25 nt, Homo sapiens
agggggcaguacuugcccaggguca

SEQ ID NO: 1226 - RNA, 25 nt, Homo sapiens
aagggggcaguacuugcccaggguc

SEQ ID NO: 1227 - RNA, 25 nt, Homo sapiens
cugaaaagggggcaguacuugccca

SEQ ID NO: 1228 - RNA, 25 nt, Homo sapiens
gcugaaaagggggcaguacuugccc

SEQ ID NO: 1229 - RNA, 25 nt, Homo sapiens
gggccaaugggagaggcugaaaagg

SEQ ID NO: 1230 - RNA, 25 nt, Homo sapiens
agggccaaugggagaggcugaaaag

SEQ ID NO: 1231 - RNA, 25 nt, Homo sapiens
cagggccaaugggagaggcugaaaa

SEQ ID NO: 1232 - RNA, 25 nt, Homo sapiens
ccagggccaaugggagaggcugaaa

SEQ ID NO: 1233 - RNA, 25 nt, Homo sapiens
gcagagaggccagggccaaugggag

SEQ ID NO: 1234 - RNA, 25 nt, Homo sapiens
gaggggcagagaggccagggccaau

SEQ ID NO: 1235 - RNA, 25 nt, Homo sapiens
ggaggggcagagaggccagggccaa

SEQ ID NO: 1236 - RNA, 25 nt, Homo sapiens
cucagcuggaggggcagagaggcca

SEQ ID NO: 1237 - RNA, 25 nt, Homo sapiens
acucagcuggaggggcagagaggcc

SEQ ID NO: 1238 - RNA, 25 nt, Homo sapiens
aggcaacucagcuggaggggcagag

SEQ ID NO: 1239 - RNA, 25 nt, Homo sapiens
ggaggggaaggcaacucagcuggag

SEQ ID NO: 1240 - RNA, 25 nt, Homo sapiens
aggaggggaaggcaacucagcugga

SEQ ID NO: 1241 - RNA, 25 nt, Homo sapiens
caggaggggaaggcaacucagcugg

SEQ ID NO: 1242 - RNA, 25 nt, Homo sapiens
gcucaggaggggaaggcaacucagc

SEQ ID NO: 1243 - RNA, 25 nt, Homo sapiens
gggagacauggggcucaggagggga

SEQ ID NO: 1244 - RNA, 25 nt, Homo sapiens
ccaugggagacauggggcucaggag

SEQ ID NO: 1245 - RNA, 25 nt, Homo sapiens
accaugggagacauggggcucagga

SEQ ID NO: 1246 - RNA, 25 nt, Homo sapiens
uaccaugggagacauggggcucagg

SEQ ID NO: 1247 - RNA, 25 nt, Homo sapiens
gguuaccaugggagacauggggcuc

SEQ ID NO: 1248 - RNA, 25 nt, Homo sapiens
ccucaagguuaccaugggagacaug

SEQ ID NO: 1249 - RNA, 25 nt, Homo sapiens
uccucaagguuaccaugggagacau

SEQ ID NO: 1250 - RNA, 25 nt, Homo sapiens
guccucaagguuaccaugggagaca

SEQ ID NO: 1251 - RNA, 25 nt, Homo sapiens
ucugcccaguccucaagguuaccau

SEQ ID NO: 1252 - RNA, 25 nt, Homo sapiens
aucugcccaguccucaagguuacca

SEQ ID NO: 1253 - RNA, 25 nt, Homo sapiens
ugccauggaaucugcccaguccuca

SEQ ID NO: 1254 - RNA, 25 nt, Homo sapiens
accccucucaagucagcagcugcca

SEQ ID NO: 1255 - RNA, 25 nt, Homo sapiens
aaaaaagucagguggaaguggggaa

SEQ ID NO: 1256 - RNA, 25 nt, Homo sapiens
ccucgaaaaaagucagguggaagug

SEQ ID NO: 1257 - RNA, 25 nt, Homo sapiens
cccucgaaaaaagucagguggaagu

SEQ ID NO: 1258 - RNA, 25 nt, Homo sapiens
gcccucgaaaaaagucagguggaag

SEQ ID NO: 1259 - RNA, 25 nt, Homo sapiens
gggggcgcccucgaaaaaagucagg

SEQ ID NO: 1260 - RNA, 25 nt, Homo sapiens
aacgggggcgcccucgaaaaaaguc

SEQ ID NO: 1261 - RNA, 25 nt, Homo sapiens
agcaagugaugccaaaaggaaacgg

SEQ ID NO: 1262 - RNA, 25 nt, Homo sapiens
cagcaagugaugccaaaaggaaacg

SEQ ID NO: 1263 - RNA, 25 nt, Homo sapiens
acagcaagugaugccaaaaggaaac

SEQ ID NO: 1264 - RNA, 25 nt, Homo sapiens
uacagcaagugaugccaaaaggaaa

SEQ ID NO: 1265 - RNA, 25 nt, Homo sapiens
agaggauacagcaagugaugccaaa

SEQ ID NO: 1266 - RNA, 25 nt, Homo sapiens
gcuaaagcagcaaagcaggauauag

SEQ ID NO: 1267 - RNA, 25 nt, Homo sapiens
gcuccaccagcuaaagcagcaaagc

SEQ ID NO: 1268 - RNA, 25 nt, Homo sapiens
guaccugugagugaggccagugggc

SEQ ID NO: 1269 - RNA, 25 nt, Homo sapiens
ugaaguaccugugagugaggccagu

SEQ ID NO: 1270 - RNA, 25 nt, Homo sapiens
cugaaguaccugugagugaggccag

SEQ ID NO: 1271 - RNA, 25 nt, Homo sapiens
aggacagcugaaguaccugugagug

SEQ ID NO: 1272 - RNA, 25 nt, Homo sapiens
aggaccacaugacaagggugucaag

SEQ ID NO: 1273 - RNA, 25 nt, Homo sapiens
guggugaccaaggaccacaugacaa

SEQ ID NO: 1274 - RNA, 25 nt, Homo sapiens
gguggugaccaaggaccacaugaca

SEQ ID NO: 1275 - RNA, 25 nt, Homo sapiens
gagagguaggcauagguggugacca

SEQ ID NO: 1276 - RNA, 25 nt, Homo sapiens
cagagaacagagagguaggcauagg

SEQ ID NO: 1277 - RNA, 25 nt, Homo sapiens
gcacagagaacagagagguaggcau

SEQ ID NO: 1278 - RNA, 25 nt, Homo sapiens
cccggggcacagagaacagagaggu

SEQ ID NO: 1279 - RNA, 25 nt, Homo sapiens
cagccccggggcacagagaacagag

SEQ ID NO: 1280 - RNA, 25 nt, Homo sapiens
caccugggggacucacucagccccg

SEQ ID NO: 1281 - RNA, 25 nt, Homo sapiens
ccaccugggggacucacucagcccc

SEQ ID NO: 1282 - RNA, 25 nt, Homo sapiens
uccaccugggggacucacucagccc

SEQ ID NO: 1283 - RNA, 25 nt, Homo sapiens
cugggccugggcgagcuccaccugg

SEQ ID NO: 1284 - RNA, 25 nt, Homo sapiens
ccugggccugggcgagcuccaccug

SEQ ID NO: 1285 - RNA, 25 nt, Homo sapiens
accugggccugggcgagcuccaccu

SEQ ID NO: 1286 - RNA, 25 nt, Homo sapiens
gaccugggccugggcgagcuccacc

SEQ ID NO: 1287 - RNA, 25 nt, Homo sapiens
uuugccuggaccuggaccugggccu

SEQ ID NO: 1288 - RNA, 25 nt, Homo sapiens
cuuugccuggaccuggaccugggcc

SEQ ID NO: 1289 - RNA, 25 nt, Homo sapiens
uccugcuuugccuggaccuggaccu

SEQ ID NO: 1290 - RNA, 25 nt, Homo sapiens
uuccugcuuugccuggaccuggacc

SEQ ID NO: 1291 - RNA, 25 nt, Homo sapiens
caacuguuccugcuuugccuggacc

SEQ ID NO: 1292 - RNA, 25 nt, Homo sapiens
ucuuaccaacuguuccugcuuugcc

SEQ ID NO: 1293 - RNA, 25 nt, Homo sapiens
acacugccucugucuaguagggccg

SEQ ID NO: 1294 - RNA, 25 nt, Homo sapiens
uacacugccucugucuaguagggcc

SEQ ID NO: 1295 - RNA, 25 nt, Homo sapiens
cuacacugccucugucuaguagggc

SEQ ID NO: 1296 - RNA, 25 nt, Homo sapiens
guggcuacacugccucugucuagua

SEQ ID NO: 1297 - RNA, 25 nt, Homo sapiens
aguggcuacacugccucugucuagu

SEQ ID NO: 1298 - RNA, 25 nt, Homo sapiens
aggcuuucuucaggugcccugaaag

SEQ ID NO: 1299 - RNA, 25 nt, Homo sapiens
cuauucuggcccccaggcuuucuuc

SEQ ID NO: 1300 - RNA, 25 nt, Homo sapiens
agucucuccaccuauucuggccccc

SEQ ID NO: 1301 - RNA, 25 nt, Homo sapiens
ccaaucccagucucuccaccuauuc

SEQ ID NO: 1302 - RNA, 25 nt, Homo sapiens
gcucggcugccucugcuccuucccc

SEQ ID NO: 1303 - RNA, 25 nt, Homo sapiens
ggcucggcugccucugcuccuuccc

SEQ ID NO: 1304 - RNA, 25 nt, Homo sapiens
ccugcagguuaaugcccuaguggcu

SEQ ID NO: 1305 - RNA, 25 nt, Homo sapiens
aauaaccugcagguuaaugcccuag

SEQ ID NO: 1306 - RNA, 25 nt, Homo sapiens
ucggccccaggagccaauaaccugc

SEQ ID NO: 1307 - RNA, 25 nt, Homo sapiens
agaguguaguugagagcucggcccc

SEQ ID NO: 1308 - RNA, 25 nt, Homo sapiens
cggaagaagaguguaguugagagcu

SEQ ID NO: 1309 - RNA, 25 nt, Homo sapiens
ggccgguccucucgcacguggagag

SEQ ID NO: 1310 - RNA, 25 nt, Homo sapiens
gaacuggggccgguccucucgcacg

SEQ ID NO: 1311 - RNA, 25 nt, Homo sapiens
aggaucuggaagcccgaacuggggc

SEQ ID NO: 1312 - RNA, 25 nt, Homo sapiens
ccuaaggaucuggaagcccgaacug

SEQ ID NO: 1313 - RNA, 25 nt, Homo sapiens
uccuaaggaucuggaagcccgaacu

SEQ ID NO: 1314 - RNA, 25 nt, Homo sapiens
cuccuaaggaucuggaagcccgaac

SEQ ID NO: 1315 - RNA, 25 nt, Homo sapiens
uuuacuuuuuagccuccuaaggauc

SEQ ID NO: 1316 - RNA, 25 nt, Homo sapiens
ccucucuuuacuuuuuagccuccua

SEQ ID NO: 1317 - RNA, 25 nt, Homo sapiens
acuuccuuaccugggccagucucuc

SEQ ID NO: 1318 - RNA, 25 nt, Homo sapiens
cugggccagucucucuggcuucuug

SEQ ID NO: 1319 - RNA, 25 nt, Homo sapiens
ugggccagucucucuggcuucuugu

SEQ ID NO: 1320 - RNA, 25 nt, Homo sapiens
cuggcuucuugugggcuccacccuc

SEQ ID NO: 1321 - RNA, 25 nt, Homo sapiens
uggcuucuugugggcuccacccucu

SEQ ID NO: 1322 - RNA, 25 nt, Homo sapiens
ccucuggguucucuaaaccauucuu

SEQ ID NO: 1323 - RNA, 25 nt, Homo sapiens
ucuuugguuuagaugaccguucccg

SEQ ID NO: 1324 - RNA, 25 nt, Homo sapiens
ggugcauguucguccucuucugcag

SEQ ID NO: 1325 - RNA, 25 nt, Homo sapiens
guccucuucugcagagguaccaaaa

SEQ ID NO: 1326 - RNA, 25 nt, Homo sapiens
agacuggcccagguaaggaagucag

SEQ ID NO: 1327 - RNA, 25 nt, Homo sapiens
gaagccagagagacuggcccaggua

SEQ ID NO: 1328 - RNA, 25 nt, Homo sapiens
cacaagaagccagagagacuggccc

SEQ ID NO: 1329 - RNA, 25 nt, Homo sapiens
ggagcccacaagaagccagagagac

SEQ ID NO: 1330 - RNA, 25 nt, Homo sapiens
agaaugguuuagagaacccagaggg

SEQ ID NO: 1331 - RNA, 25 nt, Homo sapiens
caaagaaugguuuagagaacccaga

SEQ ID NO: 1332 - RNA, 25 nt, Homo sapiens
ccaaagaaugguuuagagaacccag

SEQ ID NO: 1333 - RNA, 25 nt, Homo sapiens
gggaacggucaucuaaaccaaagaa

SEQ ID NO: 1334 - RNA, 25 nt, Homo sapiens
agaggacgaacaugcaccucgggaa

SEQ ID NO: 1335 - RNA, 25 nt, Homo sapiens
gcagaagaggacgaacaugcaccuc

SEQ ID NO: 1336 - RNA, 25 nt, Homo sapiens
ugcagaagaggacgaacaugcaccu

SEQ ID NO: 1337 - RNA, 25 nt, Homo sapiens
agggucaacacaccagcgagcccca

SEQ ID NO: 1338 - RNA, 25 nt, Homo sapiens
agcgagccccauggccuuaagcaca

SEQ ID NO: 1339 - RNA, 25 nt, Homo sapiens
gcgagccccauggccuuaagcacau

SEQ ID NO: 1340 - RNA, 25 nt, Homo sapiens
cuuaagcacaugggcaugugcagau

SEQ ID NO: 1341 - RNA, 25 nt, Homo sapiens
uuaagcacaugggcaugugcagauc

SEQ ID NO: 1342 - RNA, 25 nt, Homo sapiens
ggcagagaugagaugcugcuguagc

SEQ ID NO: 1343 - RNA, 25 nt, Homo sapiens
gaugagaugcugcuguagcaggaag

SEQ ID NO: 1344 - RNA, 25 nt, Homo sapiens
augagaugcugcuguagcaggaagc

SEQ ID NO: 1345 - RNA, 25 nt, Homo sapiens
agcaggaagcgggcgaccucaacga

SEQ ID NO: 1346 - RNA, 25 nt, Homo sapiens
cgggcgaccucaacgauggaacuga

SEQ ID NO: 1347 - RNA, 25 nt, Homo sapiens
aacgauggaacugaaggaccguuuc

SEQ ID NO: 1348 - RNA, 25 nt, Homo sapiens
uucaggauccgcucugcccagucac

SEQ ID NO: 1349 - RNA, 25 nt, Homo sapiens
gauccgcucugcccagucacagguc

SEQ ID NO: 1350 - RNA, 25 nt, Homo sapiens
auccgcucugcccagucacagguca

SEQ ID NO: 1351 - RNA, 25 nt, Homo sapiens
acgcugccuccaccaguucaucucg

SEQ ID NO: 1352 - RNA, 25 nt, Homo sapiens
ccuccaccaguucaucucgaggugc

SEQ ID NO: 1353 - RNA, 25 nt, Homo sapiens
cuccaccaguucaucucgaggugcu

SEQ ID NO: 1354 - RNA, 25 nt, Homo sapiens
uccaccaguucaucucgaggugcug

SEQ ID NO: 1355 - RNA, 25 nt, Homo sapiens
caucucgaggugcugggguuacuuc

SEQ ID NO: 1356 - RNA, 25 nt, Homo sapiens
aucucgaggugcugggguuacuucu

SEQ ID NO: 1357 - RNA, 25 nt, Homo sapiens
cugggguuacuucugggcccauuuc

SEQ ID NO: 1358 - RNA, 25 nt, Homo sapiens
cuucugggcccauuucuggcugaag

SEQ ID NO: 1359 - RNA, 25 nt, Homo sapiens
uucugggcccauuucuggcugaagu

SEQ ID NO: 1360 - RNA, 25 nt, Homo sapiens
ucugggcccauuucuggcugaagug

SEQ ID NO: 1361 - RNA, 25 nt, Homo sapiens
ggcccauuucuggcugaagugggga

SEQ ID NO: 1362 - RNA, 25 nt, Homo sapiens
augugcuuaaggccauggggcucgc

SEQ ID NO: 1363 - RNA, 25 nt, Homo sapiens
acaugcccaugugcuuaaggccaug

SEQ ID NO: 1364 - RNA, 25 nt, Homo sapiens
cacaugcccaugugcuuaaggccau

SEQ ID NO: 1365 - RNA, 25 nt, Homo sapiens
gcacaugcccaugugcuuaaggcca

SEQ ID NO: 1366 - RNA, 25 nt, Homo sapiens
cgaucugcacaugcccaugugcuua

SEQ ID NO: 1367 - RNA, 25 nt, Homo sapiens
aaacgguccuucaguuccaucguug

SEQ ID NO: 1368 - RNA, 25 nt, Homo sapiens
ugacugggcagagcggauccugaaa

SEQ ID NO: 1369 - RNA, 25 nt, Homo sapiens
ugcccugaccugugacugggcagag

SEQ ID NO: 1370 - RNA, 25 nt, Homo sapiens
gcagcgugugcccugaccugugacu

SEQ ID NO: 1371 - RNA, 25 nt, Homo sapiens
ggcagcgugugcccugaccugugac

SEQ ID NO: 1372 - RNA, 25 nt, Homo sapiens
ccagcaccucgagaugaacuggugg

SEQ ID NO: 1373 - RNA, 25 nt, Homo sapiens
accccagcaccucgagaugaacugg

SEQ ID NO: 1374 - RNA, 25 nt, Homo sapiens
guaaccccagcaccucgagaugaac

SEQ ID NO: 1375 - RNA, 25 nt, Homo sapiens
guccuuccccacuucagccagaaau

SEQ ID NO: 1376 - RNA, 25 nt, Homo sapiens
uguccuuccccacuucagccagaaa

SEQ ID NO: 1377 - RNA, 25 nt, Homo sapiens
gguacuuacacucucagaacccuuu

SEQ ID NO: 1378 - RNA, 25 nt, Homo sapiens
ucucagaacccuuuaggucaagucc

SEQ ID NO: 1379 - RNA, 25 nt, Homo sapiens
agaacccuuuaggucaaguccaggc

SEQ ID NO: 1380 - RNA, 25 nt, Homo sapiens
gaacccuuuaggucaaguccaggca

SEQ ID NO: 1381 - RNA, 25 nt, Homo sapiens
aacccuuuaggucaaguccaggcag

SEQ ID NO: 1382 - RNA, 25 nt, Homo sapiens
ccuuuaggucaaguccaggcagggg

SEQ ID NO: 1383 - RNA, 25 nt, Homo sapiens
ccaggcagggguggcauagacacca

SEQ ID NO: 1384 - RNA, 25 nt, Homo sapiens
caccccugccuggacuugaccuaaa

SEQ ID NO: 1385 - RNA, 25 nt, Homo sapiens
ccaccccugccuggacuugaccuaa

SEQ ID NO: 1386 - RNA, 25 nt, Homo sapiens
ccuuggugucuaugccaccccugcc

SEQ ID NO: 1387 - RNA, 25 nt, Homo sapiens
uacaguggcauaaggaggaagaccu

SEQ ID NO: 1388 - RNA, 25 nt, Homo sapiens
cagauauugcuacaguggcauaagg

SEQ ID NO: 1389 - RNA, 25 nt, Homo sapiens
caucagauauugcuacaguggcaua

SEQ ID NO: 1390 - RNA, 25 nt, Homo sapiens
uaacuugcaucagauauugcuacag

SEQ ID NO: 1391 - RNA, 25 nt, Homo sapiens
ccucucuagucaaggauacuuggac

SEQ ID NO: 1392 - RNA, 25 nt, Homo sapiens
uagucaaggauacuuggacuggccc

SEQ ID NO: 1393 - RNA, 25 nt, Homo sapiens
caccaagccuucgagcuuugauguc

SEQ ID NO: 1394 - RNA, 25 nt, Homo sapiens
accaagccuucgagcuuugauguca

SEQ ID NO: 1395 - RNA, 25 nt, Homo sapiens
aucucucugaugaucuugccaaagu

SEQ ID NO: 1396 - RNA, 25 nt, Homo sapiens
ucuugccaaaguuggcugugcugag

SEQ ID NO: 1397 - RNA, 25 nt, Homo sapiens
cuugccaaaguuggcugugcugagu

SEQ ID NO: 1398 - RNA, 25 nt, Homo sapiens
gccaaaguuggcugugcugaguggg

SEQ ID NO: 1399 - RNA, 25 nt, Homo sapiens
uuggcugugcugagugggcggcaac

SEQ ID NO: 1400 - RNA, 25 nt, Homo sapiens
acucucacaguacuuccugagugag

SEQ ID NO: 1401 - RNA, 25 nt, Homo sapiens
cucucacaguacuuccugagugaga

SEQ ID NO: 1402 - RNA, 25 nt, Homo sapiens
ucucacaguacuuccugagugagag

SEQ ID NO: 1403 - RNA, 25 nt, Homo sapiens
ccaguccaaguauccuugacuagag

SEQ ID NO: 1404 - RNA, 25 nt, Homo sapiens
ucaaagcucgaaggcuugguggccg

SEQ ID NO: 1405 - RNA, 25 nt, Homo sapiens
aucaaagcucgaaggcuugguggcc

SEQ ID NO: 1406 - RNA, 25 nt, Homo sapiens
caucaaagcucgaaggcuugguggc

SEQ ID NO: 1407 - RNA, 25 nt, Homo sapiens
cugacaucaaagcucgaaggcuugg

SEQ ID NO: 1408 - RNA, 25 nt, Homo sapiens
ucccugacaucaaagcucgaaggcu

SEQ ID NO: 1409 - RNA, 25 nt, Homo sapiens
gaucuucccugacaucaaagcucga

SEQ ID NO: 1410 - RNA, 25 nt, Homo sapiens
gccgcccacucagcacagccaacuu

SEQ ID NO: 1411 - RNA, 25 nt, Homo sapiens
gauaggcaucauaaacacuuugcuu

SEQ ID NO: 1412 - RNA, 25 nt, Homo sapiens
ucauaaacacuuugcuuuggcagac

SEQ ID NO: 1413 - RNA, 25 nt, Homo sapiens
cagacaggugucagugugcucuucc

SEQ ID NO: 1414 - RNA, 25 nt, Homo sapiens
acaggugucagugugcucuuccagg

SEQ ID NO: 1415 - RNA, 25 nt, Homo sapiens
gucagugugcucuuccaggugguug

SEQ ID NO: 1416 - RNA, 25 nt, Homo sapiens
uccaggugguugcggauccaccuau

SEQ ID NO: 1417 - RNA, 25 nt, Homo sapiens
uguacuccucauugcucaguguacu

SEQ ID NO: 1418 - RNA, 25 nt, Homo sapiens
cuuggcucugagcuacagaaacaaa

SEQ ID NO: 1419 - RNA, 25 nt, Homo sapiens
gccuaucgguggguggagggguggg

SEQ ID NO: 1420 - RNA, 25 nt, Homo sapiens
gaugccuaucgguggguggaggggu

SEQ ID NO: 1421 - RNA, 25 nt, Homo sapiens
ugaugccuaucgguggguggagggg

SEQ ID NO: 1422 - RNA, 25 nt, Homo sapiens
uuaugaugccuaucgguggguggag

SEQ ID NO: 1423 - RNA, 25 nt, Homo sapiens
uuuaugaugccuaucggugggugga

SEQ ID NO: 1424 - RNA, 25 nt, Homo sapiens
guuuaugaugccuaucggugggugg

SEQ ID NO: 1425 - RNA, 25 nt, Homo sapiens
aguguuuaugaugccuaucgguggg

SEQ ID NO: 1426 - RNA, 25 nt, Homo sapiens
caaaguguuuaugaugccuaucggu

SEQ ID NO: 1427 - RNA, 25 nt, Homo sapiens
gcaaaguguuuaugaugccuaucgg

SEQ ID NO: 1428 - RNA, 25 nt, Homo sapiens
aaagcaaaguguuuaugaugccuau

SEQ ID NO: 1429 - RNA, 25 nt, Homo sapiens
gccuauagguggauccgcaaccacc

SEQ ID NO: 1430 - RNA, 25 nt, Homo sapiens
ugaggaguacauguaugccuauagg

SEQ ID NO: 1431 - RNA, 25 nt, Homo sapiens
caaugaggaguacauguaugccuau

SEQ ID NO: 1432 - RNA, 25 nt, Homo sapiens
ucagagccaaguacacugagcaaug

SEQ ID NO: 1433 - RNA, 25 nt, Homo sapiens
uaucaaaccuaccuuuugucuccag

SEQ ID NO: 1434 - RNA, 25 nt, Homo sapiens
caaaccuaccuuuugucuccagugg

SEQ ID NO: 1435 - RNA, 25 nt, Homo sapiens
aaaccuaccuuuugucuccaguggu

SEQ ID NO: 1436 - RNA, 25 nt, Homo sapiens
cuuuugucuccagugguggguccug

SEQ ID NO: 1437 - RNA, 25 nt, Homo sapiens
uuuugucuccagugguggguccuga

SEQ ID NO: 1438 - RNA, 25 nt, Homo sapiens
uuugucuccagugguggguccugag

SEQ ID NO: 1439 - RNA, 25 nt, Homo sapiens
agugguggguccugaggggagcuga

SEQ ID NO: 1440 - RNA, 25 nt, Homo sapiens
cagaaaauuucuguacaucuugcug

SEQ ID NO: 1441 - RNA, 25 nt, Homo sapiens
aaauuucuguacaucuugcugaggu

SEQ ID NO: 1442 - RNA, 25 nt, Homo sapiens
ggacccaccacuggagacaaaaggu

SEQ ID NO: 1443 - RNA, 25 nt, Homo sapiens
cucaggacccaccacuggagacaaa

SEQ ID NO: 1444 - RNA, 25 nt, Homo sapiens
uucagcuccccucaggacccaccac

SEQ ID NO: 1445 - RNA, 25 nt, Homo sapiens
uguaucucuaccuucagcuccccuc

SEQ ID NO: 1446 - RNA, 25 nt, Homo sapiens
aggauccccucuacuuuguucugca

SEQ ID NO: 1447 - RNA, 25 nt, Homo sapiens
uacuuuguucugcacggccuugcug

SEQ ID NO: 1448 - RNA, 25 nt, Homo sapiens
acuuuguucugcacggccuugcugu

SEQ ID NO: 1449 - RNA, 25 nt, Homo sapiens
cuuuguucugcacggccuugcugug

SEQ ID NO: 1450 - RNA, 25 nt, Homo sapiens
ucugcacggccuugcuguggggaag

SEQ ID NO: 1451 - RNA, 25 nt, Homo sapiens
agaggggauccugguaaguguguug

SEQ ID NO: 1452 - RNA, 25 nt, Homo sapiens
uagaggggauccugguaaguguguu

SEQ ID NO: 1453 - RNA, 25 nt, Homo sapiens
guagaggggauccugguaagugugu

SEQ ID NO: 1454 - RNA, 25 nt, Homo sapiens
gugcagaacaaaguagaggggaucc

SEQ ID NO: 1455 - RNA, 25 nt, Homo sapiens
caaggccgugcagaacaaaguagag

SEQ ID NO: 1456 - RNA, 25 nt, Homo sapiens
gcaaggccgugcagaacaaaguaga

SEQ ID NO: 1457 - RNA, 25 nt, Homo sapiens
agcaaggccgugcagaacaaaguag

SEQ ID NO: 1458 - RNA, 25 nt, Homo sapiens
gaugaguacuuacgaaaugguaccu

SEQ ID NO: 1459 - RNA, 25 nt, Homo sapiens
aaugguaccucggagccucugaaga

SEQ ID NO: 1460 - RNA, 25 nt, Homo sapiens
augguaccucggagccucugaagaa

SEQ ID NO: 1461 - RNA, 25 nt, Homo sapiens
guaccucggagccucugaagaaggg

SEQ ID NO: 1462 - RNA, 25 nt, Homo sapiens
cucggagccucugaagaaggguggu

SEQ ID NO: 1463 - RNA, 25 nt, Homo sapiens
uagguuccccagccucagcaccacc

SEQ ID NO: 1464 - RNA, 25 nt, Homo sapiens
agguuccccagccucagcaccaccu

SEQ ID NO: 1465 - RNA, 25 nt, Homo sapiens
gguuccccagccucagcaccaccug

SEQ ID NO: 1466 - RNA, 25 nt, Homo sapiens
guuccccagccucagcaccaccugg

SEQ ID NO: 1467 - RNA, 25 nt, Homo sapiens
uuccccagccucagcaccaccuggg

SEQ ID NO: 1468 - RNA, 25 nt, Homo sapiens
uccccagccucagcaccaccugggg

SEQ ID NO: 1469 - RNA, 25 nt, Homo sapiens
ccugggggggcccuucccccagucu

SEQ ID NO: 1470 - RNA, 25 nt, Homo sapiens
cugggggggcccuucccccagucuu

SEQ ID NO: 1471 - RNA, 25 nt, Homo sapiens
ugggggggcccuucccccagucuug

SEQ ID NO: 1472 - RNA, 25 nt, Homo sapiens
ccccagucuuggggcucuuagcauc

SEQ ID NO: 1473 - RNA, 25 nt, Homo sapiens
gcaucaggcucaucuucugccaucc

SEQ ID NO: 1474 - RNA, 25 nt, Homo sapiens
gcucaucuucugccaucccggcaug

SEQ ID NO: 1475 - RNA, 25 nt, Homo sapiens
cucaucuucugccaucccggcauga

SEQ ID NO: 1476 - RNA, 25 nt, Homo sapiens
ucccggcaugagggcuagaauugag

SEQ ID NO: 1477 - RNA, 25 nt, Homo sapiens
cccggcaugagggcuagaauugaga

SEQ ID NO: 1478 - RNA, 25 nt, Homo sapiens
caugagggcuagaauugagagggac

SEQ ID NO: 1479 - RNA, 25 nt, Homo sapiens
cuaccacccuucuucagaggcuccg

SEQ ID NO: 1480 - RNA, 25 nt, Homo sapiens
uggggaaccuaccacccuucuucag

SEQ ID NO: 1481 - RNA, 25 nt, Homo sapiens
gcccccccagguggugcugaggcug

SEQ ID NO: 1482 - RNA, 25 nt, Homo sapiens
ggcccccccagguggugcugaggcu

SEQ ID NO: 1483 - RNA, 25 nt, Homo sapiens
gggcccccccagguggugcugaggc

SEQ ID NO: 1484 - RNA, 25 nt, Homo sapiens
ggaagggcccccccagguggugcug

SEQ ID NO: 1485 - RNA, 25 nt, Homo sapiens
agacugggggaagggcccccccagg

SEQ ID NO: 1486 - RNA, 25 nt, Homo sapiens
ccaagacugggggaagggccccccc

SEQ ID NO: 1487 - RNA, 25 nt, Homo sapiens
gcuaagagccccaagacugggggaa

SEQ ID NO: 1488 - RNA, 25 nt, Homo sapiens
ugcuaagagccccaagacuggggga

SEQ ID NO: 1489 - RNA, 25 nt, Homo sapiens
cugaugcuaagagccccaagacugg

SEQ ID NO: 1490 - RNA, 25 nt, Homo sapiens
ccugaugcuaagagccccaagacug

SEQ ID NO: 1491 - RNA, 25 nt, Homo sapiens
gccugaugcuaagagccccaagacu

SEQ ID NO: 1492 - RNA, 25 nt, Homo sapiens
agccugaugcuaagagccccaagac

SEQ ID NO: 1493 - RNA, 25 nt, Homo sapiens
cucaauucuagcccucaugccggga

SEQ ID NO: 1494 - RNA, 25 nt, Homo sapiens
cccucucaauucuagcccucaugcc

SEQ ID NO: 1495 - RNA, 25 nt, Homo sapiens
ucccucucaauucuagcccucaugc

SEQ ID NO: 1496 - RNA, 25 nt, Homo sapiens
uuagaaauuauuccauuacuucgcc

SEQ ID NO: 1497 - RNA, 25 nt, Homo sapiens
ccaccuuucugaagucuccuaaauc

SEQ ID NO: 1498 - RNA, 25 nt, Homo sapiens
gucuccuaaaucuggaaaacuguaa

SEQ ID NO: 1499 - RNA, 25 nt, Homo sapiens
ucuggaaaacuguaaaggaagagau

SEQ ID NO: 1500 - RNA, 25 nt, Homo sapiens
cuggaaaacuguaaaggaagagaua

SEQ ID NO: 1501 - RNA, 25 nt, Homo sapiens
ggcaaguggugagaaaaagaccacc

SEQ ID NO: 1502 - RNA, 25 nt, Homo sapiens
aggcaaguggugagaaaaagaccac

SEQ ID NO: 1503 - RNA, 25 nt, Homo sapiens
auuucuaauuuucggagaaggcaag

SEQ ID NO: 1504 - RNA, 25 nt, Homo sapiens
uggaauaauuucuaauuuucggaga

SEQ ID NO: 1505 - RNA, 25 nt, Homo sapiens
aaguaauggaauaauuucuaauuuu

SEQ ID NO: 1506 - RNA, 25 nt, Homo sapiens
ggcauauaugggccuggcgaaguaa

SEQ ID NO: 1507 - RNA, 25 nt, Homo sapiens
agaucucuuugggcauauaugggcc

SEQ ID NO: 1508 - RNA, 25 nt, Homo sapiens
ggcaaagaucucuuugggcauauau

SEQ ID NO: 1509 - RNA, 25 nt, Homo sapiens
uggcaaagaucucuuugggcauaua

SEQ ID NO: 1510 - RNA, 25 nt, Homo sapiens
gaauggagauggcaaagaucucuuu

SEQ ID NO: 1511 - RNA, 25 nt, Homo sapiens
agaauggagauggcaaagaucucuu

SEQ ID NO: 1512 - RNA, 25 nt, Homo sapiens
aaagguggggcagauagaauggaga

SEQ ID NO: 1513 - RNA, 25 nt, Homo sapiens
cuucagaaagguggggcagauagaa

SEQ ID NO: 1514 - RNA, 25 nt, Homo sapiens
agauuuaggagacuucagaaaggug

SEQ ID NO: 1515 - RNA, 25 nt, Homo sapiens
cagauuuaggagacuucagaaaggu

SEQ ID NO: 1516 - RNA, 25 nt, Homo sapiens
ccagauuuaggagacuucagaaagg

SEQ ID NO: 1517 - RNA, 25 nt, Homo sapiens
uuuccagauuuaggagacuucagaa

SEQ ID NO: 1518 - RNA, 25 nt, Homo sapiens
ucuuccuuuacaguuuuccagauuu

SEQ ID NO: 1519 - RNA, 25 nt, Homo sapiens
ccaccuucacuccagcccagcccca

SEQ ID NO: 1520 - RNA, 25 nt, Homo sapiens
ucacuccagcccagccccaaggucc

SEQ ID NO: 1521 - RNA, 25 nt, Homo sapiens
cccagccccaagguccuggcccagc

SEQ ID NO: 1522 - RNA, 25 nt, Homo sapiens
guugcuuuauuuuccuuuuucugaa

SEQ ID NO: 1523 - RNA, 25 nt, Homo sapiens
cugggcuggagugaagguggcuacg

SEQ ID NO: 1524 - RNA, 25 nt, Homo sapiens
ccuuggggcugggcuggagugaagg

SEQ ID NO: 1525 - RNA, 25 nt, Homo sapiens
ggaccuuggggcugggcuggaguga

SEQ ID NO: 1526 - RNA, 25 nt, Homo sapiens
cugggccaggaccuuggggcugggc

SEQ ID NO: 1527 - RNA, 25 nt, Homo sapiens
ccggcugggccaggaccuuggggcu

SEQ ID NO: 1528 - RNA, 25 nt, Homo sapiens
gccggcugggccaggaccuuggggc

SEQ ID NO: 1529 - RNA, 25 nt, Homo sapiens
acgagccggcugggccaggaccuug

SEQ ID NO: 1530 - RNA, 25 nt, Homo sapiens
cacgagccggcugggccaggaccuu

SEQ ID NO: 1531 - RNA, 25 nt, Homo sapiens
gcacgagccggcugggccaggaccu

SEQ ID NO: 1532 - RNA, 25 nt, Homo sapiens
aagcaacgcacgagccggcugggcc

SEQ ID NO: 1533 - RNA, 25 nt, Homo sapiens
aaauaaagcaacgcacgagccggcu

SEQ ID NO: 1534 - RNA, 25 nt, Homo sapiens
aaaauaaagcaacgcacgagccggc

SEQ ID NO: 1535 - RNA, 25 nt, Homo sapiens
aaggaaaauaaagcaacgcacgagc

SEQ ID NO: 1536 - RNA, 25 nt, Homo sapiens
gcggcuguuacaaccauucagaaaa

SEQ ID NO: 1537 - RNA, 25 nt, Homo sapiens
cgcgggcguacacacgcugacgcgc

SEQ ID NO: 1538 - RNA, 25 nt, Homo sapiens
cguacacacgcugacgcgcaggcug

SEQ ID NO: 1539 - RNA, 25 nt, Homo sapiens
gcugacgcgcaggcugcggucgcgc

SEQ ID NO: 1540 - RNA, 25 nt, Homo sapiens
caggcugcggucgcgcaggcgcagu

SEQ ID NO: 1541 - RNA, 25 nt, Homo sapiens
aggcugcggucgcgcaggcgcaguc

SEQ ID NO: 1542 - RNA, 25 nt, Homo sapiens
ggcugcggucgcgcaggcgcagucg

SEQ ID NO: 1543 - RNA, 25 nt, Homo sapiens
cgcaggcgcagucggggcgccuucc

SEQ ID NO: 1544 - RNA, 25 nt, Homo sapiens
cgcagucggggcgccuucccgguau

SEQ ID NO: 1545 - RNA, 25 nt, Homo sapiens
uuuaccccagcguguccugagucuu

SEQ ID NO: 1546 - RNA, 25 nt, Homo sapiens
agucuuugguucgcgaagugccguu

SEQ ID NO: 1547 - RNA, 25 nt, Homo sapiens
uucgcgaagugccguuaggccaagc

SEQ ID NO: 1548 - RNA, 25 nt, Homo sapiens
uuaggccaagcaggugcuaaaagcc

SEQ ID NO: 1549 - RNA, 25 nt, Homo sapiens
uaggccaagcaggugcuaaaagccc

SEQ ID NO: 1550 - RNA, 25 nt, Homo sapiens
aggccaagcaggugcuaaaagcccg

SEQ ID NO: 1551 - RNA, 25 nt, Homo sapiens
agcaggugcuaaaagcccggggucg

SEQ ID NO: 1552 - RNA, 25 nt, Homo sapiens
gcuaaaagcccggggucguggaccc

SEQ ID NO: 1553 - RNA, 25 nt, Homo sapiens
aagcccggggucguggaccccggcc

SEQ ID NO: 1554 - RNA, 25 nt, Homo sapiens
ggaccccggccaggucuuagcagca

SEQ ID NO: 1555 - RNA, 25 nt, Homo sapiens
ccccggccaggucuuagcagcaugg

SEQ ID NO: 1556 - RNA, 25 nt, Homo sapiens
ccaggucuuagcagcauggaggcgc

SEQ ID NO: 1557 - RNA, 25 nt, Homo sapiens
caggucuuagcagcauggaggcgca

SEQ ID NO: 1558 - RNA, 25 nt, Homo sapiens
agcagcauggaggcgcaggguguag

SEQ ID NO: 1559 - RNA, 25 nt, Homo sapiens
agcauggaggcgcaggguguagcgg

SEQ ID NO: 1560 - RNA, 25 nt, Homo sapiens
gcauggaggcgcaggguguagcgga

SEQ ID NO: 1561 - RNA, 25 nt, Homo sapiens
gaggcgcaggguguagcggagggcg

SEQ ID NO: 1562 - RNA, 25 nt, Homo sapiens
aggcgcaggguguagcggagggcgc

SEQ ID NO: 1563 - RNA, 25 nt, Homo sapiens
ggcgcaggguguagcggagggcgcg

SEQ ID NO: 1564 - RNA, 25 nt, Homo sapiens
caggguguagcggagggcgcggggc

SEQ ID NO: 1565 - RNA, 25 nt, Homo sapiens
aggguguagcggagggcgcggggcc

SEQ ID NO: 1566 - RNA, 25 nt, Homo sapiens
agggcgcggggccgggcgccgccag

SEQ ID NO: 1567 - RNA, 25 nt, Homo sapiens
gccgccagcggcgugccccaccccg

SEQ ID NO: 1568 - RNA, 25 nt, Homo sapiens
gugccccaccccgcggcccuagccc

SEQ ID NO: 1569 - RNA, 25 nt, Homo sapiens
caccccgcggcccuagccccggcug

SEQ ID NO: 1570 - RNA, 25 nt, Homo sapiens
cuagccccggcugcggcucccaccu

SEQ ID NO: 1571 - RNA, 25 nt, Homo sapiens
gcggcucccaccuuggcgccagccu

SEQ ID NO: 1572 - RNA, 25 nt, Homo sapiens
gcucccaccuuggcgccagccucgg

SEQ ID NO: 1573 - RNA, 25 nt, Homo sapiens
cccaccuuggcgccagccucggugg

SEQ ID NO: 1574 - RNA, 25 nt, Homo sapiens
uuggcgccagccucgguggcggccg

SEQ ID NO: 1575 - RNA, 25 nt, Homo sapiens
cccugcuagugaugcaacccugugc

SEQ ID NO: 1576 - RNA, 25 nt, Homo sapiens
ccugcuagugaugcaacccugugcu

SEQ ID NO: 1577 - RNA, 25 nt, Homo sapiens
cuagugaugcaacccugugcugggc

SEQ ID NO: 1578 - RNA, 25 nt, Homo sapiens
augcaacccugugcugggcaggacg

SEQ ID NO: 1579 - RNA, 25 nt, Homo sapiens
cccugugcugggcaggacgaggcug

SEQ ID NO: 1580 - RNA, 25 nt, Homo sapiens
cugggcaggacgaggcugcggcccc

SEQ ID NO: 1581 - RNA, 25 nt, Homo sapiens
ugggcaggacgaggcugcggccccc

SEQ ID NO: 1582 - RNA, 25 nt, Homo sapiens
gggcaggacgaggcugcggcccccg

SEQ ID NO: 1583 - RNA, 25 nt, Homo sapiens
ggcaggacgaggcugcggcccccgg

SEQ ID NO: 1584 - RNA, 25 nt, Homo sapiens
aggcugcggcccccgggggcagcgu

SEQ ID NO: 1585 - RNA, 25 nt, Homo sapiens
ggcugcggcccccgggggcagcguu

SEQ ID NO: 1586 - RNA, 25 nt, Homo sapiens
gcugcggcccccgggggcagcguug

SEQ ID NO: 1587 - RNA, 25 nt, Homo sapiens
gcggcccccgggggcagcguugggg

SEQ ID NO: 1588 - RNA, 25 nt, Homo sapiens
cggcccccgggggcagcguuggggc

SEQ ID NO: 1589 - RNA, 25 nt, Homo sapiens
cagcguuggggcgggcaagcccguu

SEQ ID NO: 1590 - RNA, 25 nt, Homo sapiens
gcaagcccguuagguaccugugcga

SEQ ID NO: 1591 - RNA, 25 nt, Homo sapiens
caagcccguuagguaccugugcgaa

SEQ ID NO: 1592 - RNA, 25 nt, Homo sapiens
aagcccguuagguaccugugcgaag

SEQ ID NO: 1593 - RNA, 25 nt, Homo sapiens
ccguuagguaccugugcgaaggggc

SEQ ID NO: 1594 - RNA, 25 nt, Homo sapiens
cguuagguaccugugcgaaggggcc

SEQ ID NO: 1595 - RNA, 25 nt, Homo sapiens
guuagguaccugugcgaaggggccg

SEQ ID NO: 1596 - RNA, 25 nt, Homo sapiens
gguaccugugcgaaggggccgggga

SEQ ID NO: 1597 - RNA, 25 nt, Homo sapiens
ugcgaaggggccggggauggcgaag

SEQ ID NO: 1598 - RNA, 25 nt, Homo sapiens
gaaggggccggggauggcgaagagg

SEQ ID NO: 1599 - RNA, 25 nt, Homo sapiens
gggccggggauggcgaagaggaggc

SEQ ID NO: 1600 - RNA, 25 nt, Homo sapiens
ggccggggauggcgaagaggaggcu

SEQ ID NO: 1601 - RNA, 25 nt, Homo sapiens
gccggggauggcgaagaggaggcug

SEQ ID NO: 1602 - RNA, 25 nt, Homo sapiens
ggggauggcgaagaggaggcugggg

SEQ ID NO: 1603 - RNA, 25 nt, Homo sapiens
ggcgaagaggaggcuggggaggacg

SEQ ID NO: 1604 - RNA, 25 nt, Homo sapiens
gaagaggaggcuggggaggacgagg

SEQ ID NO: 1605 - RNA, 25 nt, Homo sapiens
gacgaggcggaccuguuagacacuu

SEQ ID NO: 1606 - RNA, 25 nt, Homo sapiens
gaccuguuagacacuucggacccuc

SEQ ID NO: 1607 - RNA, 25 nt, Homo sapiens
accuguuagacacuucggacccucc

SEQ ID NO: 1608 - RNA, 25 nt, Homo sapiens
ccuguuagacacuucggacccuccg

SEQ ID NO: 1609 - RNA, 25 nt, Homo sapiens
cuguuagacacuucggacccuccgg

SEQ ID NO: 1610 - RNA, 25 nt, Homo sapiens
uguuagacacuucggacccuccggg

SEQ ID NO: 1611 - RNA, 25 nt, Homo sapiens
uagacacuucggacccuccgggggg

SEQ ID NO: 1612 - RNA, 25 nt, Homo sapiens
gacccuccggggggaggcgagagcg

SEQ ID NO: 1613 - RNA, 25 nt, Homo sapiens
gggggaggcgagagcgcggcuaguu

SEQ ID NO: 1614 - RNA, 25 nt, Homo sapiens
ggaggcgagagcgcggcuaguuugg

SEQ ID NO: 1615 - RNA, 25 nt, Homo sapiens
agcgcggcuaguuuggaggaucuag

SEQ ID NO: 1616 - RNA, 25 nt, Homo sapiens
gcuaguuuggaggaucuagaggacg

SEQ ID NO: 1617 - RNA, 25 nt, Homo sapiens
gaucuagaggacgaggagacucacu

SEQ ID NO: 1618 - RNA, 25 nt, Homo sapiens
aucuagaggacgaggagacucacuc

SEQ ID NO: 1619 - RNA, 25 nt, Homo sapiens
ucuagaggacgaggagacucacucg

SEQ ID NO: 1620 - RNA, 25 nt, Homo sapiens
cuagaggacgaggagacucacucgg

SEQ ID NO: 1621 - RNA, 25 nt, Homo sapiens
uagaggacgaggagacucacucggg

SEQ ID NO: 1622 - RNA, 25 nt, Homo sapiens
gacgaggagacucacucggggggcg

SEQ ID NO: 1623 - RNA, 25 nt, Homo sapiens
acgaggagacucacucggggggcga

SEQ ID NO: 1624 - RNA, 25 nt, Homo sapiens
cucacucggggggcgagggcagcag

SEQ ID NO: 1625 - RNA, 25 nt, Homo sapiens
ucacucggggggcgagggcagcagc

SEQ ID NO: 1626 - RNA, 25 nt, Homo sapiens
cacucggggggcgagggcagcagcg

SEQ ID NO: 1627 - RNA, 25 nt, Homo sapiens
acucggggggcgagggcagcagcgg

SEQ ID NO: 1628 - RNA, 25 nt, Homo sapiens
gggcgagggcagcagcgggggcgcc

SEQ ID NO: 1629 - RNA, 25 nt, Homo sapiens
cgagggcagcagcgggggcgcccgg

SEQ ID NO: 1630 - RNA, 25 nt, Homo sapiens
gggcagcagcgggggcgcccggagg

SEQ ID NO: 1631 - RNA, 25 nt, Homo sapiens
ggcagcagcgggggcgcccggaggc

SEQ ID NO: 1632 - RNA, 25 nt, Homo sapiens
gcagcagcgggggcgcccggaggcg

SEQ ID NO: 1633 - RNA, 25 nt, Homo sapiens
gcgggggcgcccggaggcggggcag

SEQ ID NO: 1634 - RNA, 25 nt, Homo sapiens
ggggcgcccggaggcggggcagcgg

SEQ ID NO: 1635 - RNA, 25 nt, Homo sapiens
gggcgcccggaggcggggcagcggu

SEQ ID NO: 1636 - RNA, 25 nt, Homo sapiens
ggcgcccggaggcggggcagcggug

SEQ ID NO: 1637 - RNA, 25 nt, Homo sapiens
gcgcccggaggcggggcagcggugg

SEQ ID NO: 1638 - RNA, 25 nt, Homo sapiens
gcaugagcaagaccugcaccuacga

SEQ ID NO: 1639 - RNA, 25 nt, Homo sapiens
gaaggcugcagcgagaccacgagcc

SEQ ID NO: 1640 - RNA, 25 nt, Homo sapiens
ggcugcagcgagaccacgagccagg

SEQ ID NO: 1641 - RNA, 25 nt, Homo sapiens
ccagguggccaagcagcgcaaaccg

SEQ ID NO: 1642 - RNA, 25 nt, Homo sapiens
aagaaacaccgcaacaagauguaca

SEQ ID NO: 1643 - RNA, 25 nt, Homo sapiens
aaguauaaaaagaagaagagcgacc

SEQ ID NO: 1644 - RNA, 25 nt, Homo sapiens
agaagagcgaccaggcccugaacug

SEQ ID NO: 1645 - RNA, 25 nt, Homo sapiens
agagcgaccaggcccugaacugcgg

SEQ ID NO: 1646 - RNA, 25 nt, Homo sapiens
gagcgaccaggcccugaacugcggu

SEQ ID NO: 1647 - RNA, 25 nt, Homo sapiens
ugaacugcggugggacugccucgac

SEQ ID NO: 1648 - RNA, 25 nt, Homo sapiens
ggugggacugccucgacuggcagcg

SEQ ID NO: 1649 - RNA, 25 nt, Homo sapiens
gugggacugccucgacuggcagcgc

SEQ ID NO: 1650 - RNA, 25 nt, Homo sapiens
ggcagcgcgggaaacgucaaacucg

SEQ ID NO: 1651 - RNA, 25 nt, Homo sapiens
aaacucgagguaucagacuuagcug

SEQ ID NO: 1652 - RNA, 25 nt, Homo sapiens
gggguaaaaggcgccuauaccggga

SEQ ID NO: 1653 - RNA, 25 nt, Homo sapiens
cgcugggguaaaaggcgccuauacc

SEQ ID NO: 1654 - RNA, 25 nt, Homo sapiens
acgcugggguaaaaggcgccuauac

SEQ ID NO: 1655 - RNA, 25 nt, Homo sapiens
aagacucaggacacgcugggguaaa

SEQ ID NO: 1656 - RNA, 25 nt, Homo sapiens
cgaaccaaagacucaggacacgcug

SEQ ID NO: 1657 - RNA, 25 nt, Homo sapiens
gcgaaccaaagacucaggacacgcu

SEQ ID NO: 1658 - RNA, 25 nt, Homo sapiens
cgcgaaccaaagacucaggacacgc

SEQ ID NO: 1659 - RNA, 25 nt, Homo sapiens
acggcacuucgcgaaccaaagacuc

SEQ ID NO: 1660 - RNA, 25 nt, Homo sapiens
ggcuuuuagcaccugcuuggccuaa

SEQ ID NO: 1661 - RNA, 25 nt, Homo sapiens
cgaccccgggcuuuuagcaccugcu

SEQ ID NO: 1662 - RNA, 25 nt, Homo sapiens
agaccuggccgggguccacgacccc

SEQ ID NO: 1663 - RNA, 25 nt, Homo sapiens
aagaccuggccgggguccacgaccc

SEQ ID NO: 1664 - RNA, 25 nt, Homo sapiens
ccuccaugcugcuaagaccuggccg

SEQ ID NO: 1665 - RNA, 25 nt, Homo sapiens
gccuccaugcugcuaagaccuggcc

SEQ ID NO: 1666 - RNA, 25 nt, Homo sapiens
cgccuccaugcugcuaagaccuggc

SEQ ID NO: 1667 - RNA, 25 nt, Homo sapiens
ccugcgccuccaugcugcuaagacc

SEQ ID NO: 1668 - RNA, 25 nt, Homo sapiens
gguggggcacgccgcuggcggcgcc

SEQ ID NO: 1669 - RNA, 25 nt, Homo sapiens
gccgcgggguggggcacgccgcugg

SEQ ID NO: 1670 - RNA, 25 nt, Homo sapiens
agggccgcgggguggggcacgccgc

SEQ ID NO: 1671 - RNA, 25 nt, Homo sapiens
cagccggggcuagggccgcggggug

SEQ ID NO: 1672 - RNA, 25 nt, Homo sapiens
gcagccggggcuagggccgcggggu

SEQ ID NO: 1673 - RNA, 25 nt, Homo sapiens
cgcagccggggcuagggccgcgggg

SEQ ID NO: 1674 - RNA, 25 nt, Homo sapiens
agccgcagccggggcuagggccgcg

SEQ ID NO: 1675 - RNA, 25 nt, Homo sapiens
gagccgcagccggggcuagggccgc

SEQ ID NO: 1676 - RNA, 25 nt, Homo sapiens
ggagccgcagccggggcuagggccg

SEQ ID NO: 1677 - RNA, 25 nt, Homo sapiens
aaggugggagccgcagccggggcua

SEQ ID NO: 1678 - RNA, 25 nt, Homo sapiens
caaggugggagccgcagccggggcu

SEQ ID NO: 1679 - RNA, 25 nt, Homo sapiens
ggcgccaaggugggagccgcagccg

SEQ ID NO: 1680 - RNA, 25 nt, Homo sapiens
uggcgccaaggugggagccgcagcc

SEQ ID NO: 1681 - RNA, 25 nt, Homo sapiens
cuggcgccaaggugggagccgcagc

SEQ ID NO: 1682 - RNA, 25 nt, Homo sapiens
ccgccaccgaggcuggcgccaaggu

SEQ ID NO: 1683 - RNA, 25 nt, Homo sapiens
gccgccaccgaggcuggcgccaagg

SEQ ID NO: 1684 - RNA, 25 nt, Homo sapiens
gcggccgccaccgaggcuggcgcca

SEQ ID NO: 1685 - RNA, 25 nt, Homo sapiens
gagaggccgcggccgccaccgaggc

SEQ ID NO: 1686 - RNA, 25 nt, Homo sapiens
aauugagaggccgcggccgccaccg

SEQ ID NO: 1687 - RNA, 25 nt, Homo sapiens
acuagcagggugaauugagaggccg

SEQ ID NO: 1688 - RNA, 25 nt, Homo sapiens
ugcaucacuagcagggugaauugag

SEQ ID NO: 1689 - RNA, 25 nt, Homo sapiens
ccagcacaggguugcaucacuagca

SEQ ID NO: 1690 - RNA, 25 nt, Homo sapiens
cccagcacaggguugcaucacuagc

SEQ ID NO: 1691 - RNA, 25 nt, Homo sapiens
ccgcagccucguccugcccagcaca

SEQ ID NO: 1692 - RNA, 25 nt, Homo sapiens
gccgcagccucguccugcccagcac

SEQ ID NO: 1693 - RNA, 25 nt, Homo sapiens
uugcccgccccaacgcugcccccgg

SEQ ID NO: 1694 - RNA, 25 nt, Homo sapiens
cuugcccgccccaacgcugcccccg

SEQ ID NO: 1695 - RNA, 25 nt, Homo sapiens
gcuugcccgccccaacgcugccccc

SEQ ID NO: 1696 - RNA, 25 nt, Homo sapiens
ggcuugcccgccccaacgcugcccc

SEQ ID NO: 1697 - RNA, 25 nt, Homo sapiens
cggccccuucgcacagguaccuaac

SEQ ID NO: 1698 - RNA, 25 nt, Homo sapiens
ccggccccuucgcacagguaccuaa

SEQ ID NO: 1699 - RNA, 25 nt, Homo sapiens
uucgccauccccggccccuucgcac

SEQ ID NO: 1700 - RNA, 25 nt, Homo sapiens
uccccagccuccucuucgccauccc

SEQ ID NO: 1701 - RNA, 25 nt, Homo sapiens
ccccggaggguccgaagugucuaac

SEQ ID NO: 1702 - RNA, 25 nt, Homo sapiens
agccgcgcucucgccuccccccgga

SEQ ID NO: 1703 - RNA, 25 nt, Homo sapiens
uagccgcgcucucgccuccccccgg

SEQ ID NO: 1704 - RNA, 25 nt, Homo sapiens
aacuagccgcgcucucgccuccccc

SEQ ID NO: 1705 - RNA, 25 nt, Homo sapiens
cugcccccaccgcugccccgccucc

SEQ ID NO: 1706 - RNA, 25 nt, Homo sapiens
gcugcccccaccgcugccccgccuc

SEQ ID NO: 1707 - RNA, 25 nt, Homo sapiens
gucucgcugcagccuucguaggugc

SEQ ID NO: 1708 - RNA, 25 nt, Homo sapiens
cucguggucucgcugcagccuucgu

SEQ ID NO: 1709 - RNA, 25 nt, Homo sapiens
uugcgcugcuuggccaccuggcucg

SEQ ID NO: 1710 - RNA, 25 nt, Homo sapiens
ccacgguuugcgcugcuuggccacc

SEQ ID NO: 1711 - RNA, 25 nt, Homo sapiens
uugcacauccacgguuugcgcugcu

SEQ ID NO: 1712 - RNA, 25 nt, Homo sapiens
uguugcgguguuucuugcacaucca

SEQ ID NO: 1713 - RNA, 25 nt, Homo sapiens
auacuuguccuuguacaucuuguug

SEQ ID NO: 1714 - RNA, 25 nt, Homo sapiens
ggcagucccaccgcaguucagggcc

SEQ ID NO: 1715 - RNA, 25 nt, Homo sapiens
gucgaggcagucccaccgcaguuca

SEQ ID NO: 1716 - RNA, 25 nt, Homo sapiens
agucgaggcagucccaccgcaguuc

SEQ ID NO: 1717 - RNA, 25 nt, Homo sapiens
uugacguuucccgcgcugccagucg

SEQ ID NO: 1718 - RNA, 25 nt, Homo sapiens
uacucuccauuguuaaacaaagaac

SEQ ID NO: 1719 - RNA, 25 nt, Homo sapiens
uuguuaaacaaagaacaggaucuuu

SEQ ID NO: 1720 - RNA, 25 nt, Homo sapiens
uguuaaacaaagaacaggaucuuuu

SEQ ID NO: 1721 - RNA, 25 nt, Homo sapiens
guuaaacaaagaacaggaucuuuug

SEQ ID NO: 1722 - RNA, 25 nt, Homo sapiens
gaacaaguguuaaaucaaaaaagac

SEQ ID NO: 1723 - RNA, 25 nt, Homo sapiens
gagaguauguuaucugcacuuuccu

SEQ ID NO: 1724 - RNA, 25 nt, Homo sapiens
ggagaguauguuaucugcacuuucc

SEQ ID NO: 1725 - RNA, 25 nt, Homo sapiens
aaagauccuguucuuuguuuaacaa

SEQ ID NO: 1726 - RNA, 25 nt, Homo sapiens
cuuguucuaaaagaguaggucuugc

SEQ ID NO: 1727 - RNA, 25 nt, Homo sapiens
gauuuaacacuuguucuaaaagagu

SEQ ID NO: 1728 - RNA, 25 nt, Homo sapiens
caacagcuauuaaaucagcaaguuu

SEQ ID NO: 1729 - RNA, 25 nt, Homo sapiens
uggagcaaagacaacagcaguuucc

SEQ ID NO: 1730 - RNA, 25 nt, Homo sapiens
agcaguuuccaggaacaucaaugug

SEQ ID NO: 1731 - RNA, 25 nt, Homo sapiens
gcaguuuccaggaacaucaauguga

SEQ ID NO: 1732 - RNA, 25 nt, Homo sapiens
agggaacuuaccaagaacaucuaca

SEQ ID NO: 1733 - RNA, 25 nt, Homo sapiens
agcauauuuuuuuaccagacauaaa

SEQ ID NO: 1734 - RNA, 25 nt, Homo sapiens
gcauauuuuuuuaccagacauaaau

SEQ ID NO: 1735 - RNA, 25 nt, Homo sapiens
cauauuuuuuuaccagacauaaaug

SEQ ID NO: 1736 - RNA, 25 nt, Homo sapiens
uuuccuguaaauguaugugugcauu

SEQ ID NO: 1737 - RNA, 25 nt, Homo sapiens
uuccuguaaauguaugugugcauuu

SEQ ID NO: 1738 - RNA, 25 nt, Homo sapiens
uccuguaaauguaugugugcauuug

SEQ ID NO: 1739 - RNA, 25 nt, Homo sapiens
auuccucuucagucauuguuacuga

SEQ ID NO: 1740 - RNA, 25 nt, Homo sapiens
aagguaaugaagcaguuacuuucug

SEQ ID NO: 1741 - RNA, 25 nt, Homo sapiens
auuaaucuugacucaucuagcucag

SEQ ID NO: 1742 - RNA, 25 nt, Homo sapiens
ucaucuagcucagugguucucauca

SEQ ID NO: 1743 - RNA, 25 nt, Homo sapiens
caucuagcucagugguucucaucaa

SEQ ID NO: 1744 - RNA, 25 nt, Homo sapiens
uugucauagugaccuugaaaaccac

SEQ ID NO: 1745 - RNA, 25 nt, Homo sapiens
uugaaaaccacuggcuuuuagugag

SEQ ID NO: 1746 - RNA, 25 nt, Homo sapiens
aaccacuggcuuuuagugaguggcc

SEQ ID NO: 1747 - RNA, 25 nt, Homo sapiens
ggaaugcuaaauguucugcaguguc

SEQ ID NO: 1748 - RNA, 25 nt, Homo sapiens
gaaugcuaaauguucugcaguguca

SEQ ID NO: 1749 - RNA, 25 nt, Homo sapiens
aaugcuaaauguucugcagugucag

SEQ ID NO: 1750 - RNA, 25 nt, Homo sapiens
caauaacacuccuaagaaauguuga

SEQ ID NO: 1751 - RNA, 25 nt, Homo sapiens
cuaagaaauguugauggcuauuuug

SEQ ID NO: 1752 - RNA, 25 nt, Homo sapiens
cuauuuuguggugcuaacauguagu

SEQ ID NO: 1753 - RNA, 25 nt, Homo sapiens
uauuuuguggugcuaacauguaguu

SEQ ID NO: 1754 - RNA, 25 nt, Homo sapiens
auuuuguggugcuaacauguaguug

SEQ ID NO: 1755 - RNA, 25 nt, Homo sapiens
aacauguaguuggggcaccuauaau

SEQ ID NO: 1756 - RNA, 25 nt, Homo sapiens
acauguaguuggggcaccuauaauu

SEQ ID NO: 1757 - RNA, 25 nt, Homo sapiens
gcaguuaagacugaagcugucaaag

SEQ ID NO: 1758 - RNA, 25 nt, Homo sapiens
gguaagcacauuuuauauagacgua

SEQ ID NO: 1759 - RNA, 25 nt, Homo sapiens
auuauuguuuaauaucugugaauuu

SEQ ID NO: 1760 - RNA, 25 nt, Homo sapiens
auuuaggaugugcaucucuuuucag

SEQ ID NO: 1761 - RNA, 25 nt, Homo sapiens
ucagagguguguuaguaaaaccuga

SEQ ID NO: 1762 - RNA, 25 nt, Homo sapiens
aaccugacggauuaacuaagcacac

SEQ ID NO: 1763 - RNA, 25 nt, Homo sapiens
accugacggauuaacuaagcacacu

SEQ ID NO: 1764 - RNA, 25 nt, Homo sapiens
cacacugggaugugucuccuacagu

SEQ ID NO: 1765 - RNA, 25 nt, Homo sapiens
aaaaugaaaaagauccuuuucaaaa

SEQ ID NO: 1766 - RNA, 25 nt, Homo sapiens
uaauguucaaaaaugauaaguaauc

SEQ ID NO: 1767 - RNA, 25 nt, Homo sapiens
auaccuuuuucuuauacuuucuccu

SEQ ID NO: 1768 - RNA, 25 nt, Homo sapiens
cuaggaaaacuuuaaaacuuuaaaa

SEQ ID NO: 1769 - RNA, 25 nt, Homo sapiens
acuuuaaaaaggcaaaccuaccaau

SEQ ID NO: 1770 - RNA, 25 nt, Homo sapiens
augucaagagaguauauccaauauu

SEQ ID NO: 1771 - RNA, 25 nt, Homo sapiens
cuauauauaaaguucgacuuaauca

SEQ ID NO: 1772 - RNA, 25 nt, Homo sapiens
ucauggcuguucuaagaaguacuua

SEQ ID NO: 1773 - RNA, 25 nt, Homo sapiens
uuuaguuuauucuuacuagaugcag

SEQ ID NO: 1774 - RNA, 25 nt, Homo sapiens
uuuuugaagcuuaaguuacccuuua

SEQ ID NO: 1775 - RNA, 25 nt, Homo sapiens
uugaagcuuaaguuacccuuuaugg

SEQ ID NO: 1776 - RNA, 25 nt, Homo sapiens
aaacauuagcuuaugcuucuuuaga

SEQ ID NO: 1777 - RNA, 25 nt, Homo sapiens
gcuuaugcuucuuuagauggaauaa

SEQ ID NO: 1778 - RNA, 25 nt, Homo sapiens
cuuaugcuucuuuagauggaauaau

SEQ ID NO: 1779 - RNA, 25 nt, Homo sapiens
gcuucuuuagauggaauaaugggaa

SEQ ID NO: 1780 - RNA, 25 nt, Homo sapiens
ucuuuagauggaauaaugggaaagg

SEQ ID NO: 1781 - RNA, 25 nt, Homo sapiens
cuuuagauggaauaaugggaaagga

SEQ ID NO: 1782 - RNA, 25 nt, Homo sapiens
auggaauaaugggaaaggagggaaa

SEQ ID NO: 1783 - RNA, 25 nt, Homo sapiens
uggaauaaugggaaaggagggaaau

SEQ ID NO: 1784 - RNA, 25 nt, Homo sapiens
aaugggaaaggagggaaaugggaaa

SEQ ID NO: 1785 - RNA, 25 nt, Homo sapiens
ggaaaggagggaaaugggaaaugga

SEQ ID NO: 1786 - RNA, 25 nt, Homo sapiens
gagggaaaugggaaauggauggaaa

SEQ ID NO: 1787 - RNA, 25 nt, Homo sapiens
agggaaaugggaaauggauggaaau

SEQ ID NO: 1788 - RNA, 25 nt, Homo sapiens
aaugggaaauggauggaaaugggaa

SEQ ID NO: 1789 - RNA, 25 nt, Homo sapiens
gggaaauggauggaaaugggaaagg

SEQ ID NO: 1790 - RNA, 25 nt, Homo sapiens
ggaaauggauggaaaugggaaagga

SEQ ID NO: 1791 - RNA, 25 nt, Homo sapiens
auagcccagugagagcugaaugaaa

SEQ ID NO: 1792 - RNA, 25 nt, Homo sapiens
uagcccagugagagcugaaugaaaa

SEQ ID NO: 1793 - RNA, 25 nt, Homo sapiens
ugugaugaugaguaauugucagacg

SEQ ID NO: 1794 - RNA, 25 nt, Homo sapiens
gugaugaugaguaauugucagacgu

SEQ ID NO: 1795 - RNA, 25 nt, Homo sapiens
gucagacgugggauagauaacugag

SEQ ID NO: 1796 - RNA, 25 nt, Homo sapiens
acugagaggcucagaaucuuuacca

SEQ ID NO: 1797 - RNA, 25 nt, Homo sapiens
agaaucuuuaccaaggauauuuuuu

SEQ ID NO: 1798 - RNA, 25 nt, Homo sapiens
uuuaccaaggauauuuuuuaggaua

SEQ ID NO: 1799 - RNA, 25 nt, Homo sapiens
uaagguagcugccuguucaugaauu

SEQ ID NO: 1800 - RNA, 25 nt, Homo sapiens
guucaugaauuuggauaagaauagu

SEQ ID NO: 1801 - RNA, 25 nt, Homo sapiens
uuauaaaaugaucaauaaagcaaua

SEQ ID NO: 1802 - RNA, 25 nt, Homo sapiens
aucaauaaagcaauaagguuuauuu

SEQ ID NO: 1803 - RNA, 25 nt, Homo sapiens
ucaauaaagcaauaagguuuauuuu

SEQ ID NO: 1804 - RNA, 25 nt, Homo sapiens
guuucuguaaaaauugcacuacuuc

SEQ ID NO: 1805 - RNA, 25 nt, Homo sapiens
guaaguucccucacauugauguucc

SEQ ID NO: 1806 - RNA, 25 nt, Homo sapiens
agauaaaaaaccauguagauguucu

SEQ ID NO: 1807 - RNA, 25 nt, Homo sapiens
cauagauuauuaccccauuuauguc

SEQ ID NO: 1808 - RNA, 25 nt, Homo sapiens
uuacaggaaaauguuuauguucuac

SEQ ID NO: 1809 - RNA, 25 nt, Homo sapiens
uccccaaaugcacacauacauuuac

SEQ ID NO: 1810 - RNA, 25 nt, Homo sapiens
aaaaacauuauaauuaaauguuauu

SEQ ID NO: 1811 - RNA, 25 nt, Homo sapiens
uuaccuucaguaacaaugacugaag

SEQ ID NO: 1812 - RNA, 25 nt, Homo sapiens
ugagugauuuucggucaccuuuuca

SEQ ID NO: 1813 - RNA, 25 nt, Homo sapiens
aaggaccggugagugauuuucgguc

SEQ ID NO: 1814 - RNA, 25 nt, Homo sapiens
cugugacgucuuguaaaucguaagg

SEQ ID NO: 1815 - RNA, 25 nt, Homo sapiens
cgcccacucuguuagaaaucauaca

SEQ ID NO: 1816 - RNA, 25 nt, Homo sapiens
acgcccacucuguuagaaaucauac

SEQ ID NO: 1817 - RNA, 25 nt, Homo sapiens
uucuuaggaguguauaaccgugacg

SEQ ID NO: 1818 - RNA, 25 nt, Homo sapiens
uuucuuaggaguguauaaccgugac

SEQ ID NO: 1819 - RNA, 25 nt, Homo sapiens
caucaacauuucuuaggaguguaua

SEQ ID NO: 1820 - RNA, 25 nt, Homo sapiens
cacaaaauagccaucaacauuucuu

SEQ ID NO: 1821 - RNA, 25 nt, Homo sapiens
aagguuauuaagagaacccaauuau

SEQ ID NO: 1822 - RNA, 25 nt, Homo sapiens
cagcuucagucuuaacugcaaagaa

SEQ ID NO: 1823 - RNA, 25 nt, Homo sapiens
ucccagugugcuuaguuaauccguc

SEQ ID NO: 1824 - RNA, 25 nt, Homo sapiens
aacaucaaagagagaagccaacugu

SEQ ID NO: 1825 - RNA, 25 nt, Homo sapiens
ucugcuuuaagagaucagcacuaac

SEQ ID NO: 1826 - RNA, 25 nt, Homo sapiens
aaaauaauuuugucuuggcauuggu

SEQ ID NO: 1827 - RNA, 25 nt, Homo sapiens
aaaaauaauuuugucuuggcauugg

SEQ ID NO: 1828 - RNA, 25 nt, Homo sapiens
aagaaaaauaauuuugucuuggcau

SEQ ID NO: 1829 - RNA, 25 nt, Homo sapiens
aaguauaagaaaaauaauuuugucu

SEQ ID NO: 1830 - RNA, 25 nt, Homo sapiens
uauuuucaggaucaccuuuuugaaa

SEQ ID NO: 1831 - RNA, 25 nt, Homo sapiens
auacuggaguguuaguuuuauuuuc

SEQ ID NO: 1832 - RNA, 25 nt, Homo sapiens
auugcgaaaaacaaugacaaaauac

SEQ ID NO: 1833 - RNA, 25 nt, Homo sapiens
uacuuaucauuuuugaacauuacuu

SEQ ID NO: 1834 - RNA, 25 nt, Homo sapiens
uuuccuaggagaaaguauaagaaaa

SEQ ID NO: 1835 - RNA, 25 nt, Homo sapiens
cuuuuuaaaguuuuaaaguuuuccu

SEQ ID NO: 1836 - RNA, 25 nt, Homo sapiens
cauuuaauuuguuauuccuauuggu

SEQ ID NO: 1837 - RNA, 25 nt, Homo sapiens
uugacauuuaauuuguuauuccuau

SEQ ID NO: 1838 - RNA, 25 nt, Homo sapiens
gacacauacauuuauauccuaauau

SEQ ID NO: 1839 - RNA, 25 nt, Homo sapiens
aucagcuaacucaaaggucaacaac

SEQ ID NO: 1840 - RNA, 25 nt, Homo sapiens
agaauaaagaaaucagcuaacucaa

SEQ ID NO: 1841 - RNA, 25 nt, Homo sapiens
auaagcuaauguuuuccaccauaaa

SEQ ID NO: 1842 - RNA, 25 nt, Homo sapiens
cauaagcuaauguuuuccaccauaa

SEQ ID NO: 1843 - RNA, 25 nt, Homo sapiens
ucagggauuucauucagcucucacu

SEQ ID NO: 1844 - RNA, 25 nt, Homo sapiens
gucagggauuucauucagcucucac

SEQ ID NO: 1845 - RNA, 25 nt, Homo sapiens
gcuaccuuauccuaaaaaauauccu

SEQ ID NO: 1846 - RNA, 25 nt, Homo sapiens
acuauucuuauccaaauucaugaac

SEQ ID NO: 1847 - RNA, 25 nt, Homo sapiens
uuauaagguaaaaaaaugucuaaug

SEQ ID NO: 1848 - RNA, 25 nt, Homo sapiens
uuauugcuuuauugaucauuuuaua

SEQ ID NO: 1849 - RNA, 20 nt, Homo sapiens
uucccggccuuuuuaccuug

SEQ ID NO: 1850 - protein, 253 aa, Artificial Sequence
  Description of Artificial Sequence: Synthetic polypeptide
EVQLQQSGPGLVKPSQTLSLTCAISGDSMLSNSDTWNWIRQSPSRGLEWLGRTYHRSTWYDDYASSVRGRVSINVDTSKNQYSLQLNAVTPEDTGVYYCARVRLQDGNSWSDAFDVWGQGTMVTVSSGGGGSGGGGSGGGGSQSALTQPASASGSPGQSVTISCTGTSSDVGGYNYVSWYQQHPGKAPKLMIYDVSNRPSGVSNRFSGSKSGNTASLTISGLQAEDEADYYCSSYTSSSTLYVFGTGTQLTVL

SEQ ID NO: 1851 - protein, 127 aa, Artificial Sequence
  Description of Artificial Sequence: Synthetic polypeptide
EVQLQQSGPGLVKPSQTLSLTCAISGDSMLSNSDTWNWIRQSPSRGLEWLGRTYHRSTWYDDYASSVRGRVSINVDTSKNQYSLQLNAVTPEDTGVYYCARVRLQDGNSWSDAFDVWGQGTMVTVSS

SEQ ID NO: 1852 - protein, 111 aa, Artificial Sequence
  Description of Artificial Sequence: Synthetic polypeptide
QSALTQPASASGSPGQSVTISCTGTSSDVGGYNYVSWYQQHPGKAPKLMIYDVSNRPSGVSNRFSGSKSGNTASLTISGLQAEDEADYYCSSYTSSSTLYVFGTGTQLTVL

SEQ ID NO: 1853 - protein, 12 aa, Artificial Sequence
  Description of Artificial Sequence: Synthetic peptide
GDSMLSNSDTWN

SEQ ID NO: 1854 - protein, 7 aa, Artificial Sequence
  Description of Artificial Sequence: Synthetic peptide
SNSDTWN

SEQ ID NO: 1855 - protein, 15 aa, Artificial Sequence
  Description of Artificial Sequence: Synthetic peptide
VRLQDGNSWSDAFDV

SEQ ID NO: 1856 - protein, 15 aa, Artificial Sequence
  Description of Artificial Sequence: Synthetic peptide
VRLQDGNSWSDAFDV

SEQ ID NO: 1857 - protein, 14 aa, Artificial Sequence
  Description of Artificial Sequence: Synthetic peptide
TGTSSDVGGYNYVS

SEQ ID NO: 1858 - protein, 11 aa, Artificial Sequence
  Description of Artificial Sequence: Synthetic peptide
SSYTSSSTLYV

SEQ ID NO: 1859 - protein, 7 aa, Artificial Sequence
  Description of Artificial Sequence: Synthetic peptide
LAEAAAK

SEQ ID NO: 1860 - protein, 243 aa, Artificial Sequence
  Description of Artificial Sequence: Synthetic polypeptide
EVQLQQSGPGLVKPSQTLSLTCAISGDSMLSNSDTWNWIRQSPSRGLEWLGRTYHRSTWYDDYASSVRGRVSINVDTSKNQYSLQLNAVTPEDTGVYYCARVRLQDGNSWSDAFDVWGQGTMVTVSSGGGGSQSALTQPASASGSPGQSVTISCTGTSSDVGGYNYVSWYQQHPGKAPKLMIYDVSNRPSGVSNRFSGSKSGNTASLTISGLQAEDEADYYCSSYTSSSTLYVFGTGTQLTVL

SEQ ID NO: 1861 - protein, 238 aa, Artificial Sequence
  Description of Artificial Sequence: Synthetic polypeptide
EVQLQQSGPGLVKPSQTLSLTCAISGDSMLSNSDTWNWIRQSPSRGLEWLGRTYHRSTWYDDYASSVRGRVSINVDTSKNQYSLQLNAVTPEDTGVYYCARVRLQDGNSWSDAFDVWGQGTMVTVSSQSALTQPASASGSPGQSVTISCTGTSSDVGGYNYVSWYQQHPGKAPKLMIYDVSNRPSGVSNRFSGSKSGNTASLTISGLQAEDEADYYCSSYTSSSTLYVFGTGTQLTVL

SEQ ID NO: 1862 - protein, 243 aa, Artificial Sequence
  Description of Artificial Sequence: Synthetic polypeptide
EVQLQQSGPGLVKPSQTLSLTCAISGDSMLSNSDTWNWIRKSPSRGLEWLGRTYHRSTWYDDYASSVRGRVSINVDTSKNQYSLQLNAVTPEDTGVYYCARVRLQDGNSWSDAFDVWGQGTMVTVSSGGGGSQSALTQPASASGSPGQSVTISCTGTSSDVGGYNYVSWYQDHPGKAPKLMIYDVSNRPSGVSNRFSGSKSGNTASLTISGLQAEDEADYYCSSYTSSSTLYVFGTGTQLTVL

SEQ ID NO: 1863 - protein, 127 aa, Artificial Sequence
  Description of Artificial Sequence: Synthetic polypeptide
EVQLQQSGPGLVKPSQTLSLTCAISGDSMLSNSDTWNWIRKSPSRGLEWLGRTYHRSTWYDDYASSVRGRVSINVDTSKNQYSLQLNAVTPEDTGVYYCARVRLQDGNSWSDAFDVWGQGTMVTVSS

SEQ ID NO: 1864 - protein, 111 aa, Artificial Sequence
  Description of Artificial Sequence: Synthetic polypeptide
QSALTQPASASGSPGQSVTISCTGTSSDVGGYNYVSWYQDHPGKAPKLMIYDVSNRPSGVSNRFSGSKSGNTASLTISGLQAEDEADYYCSSYTSSSTLYVFGTGTQLTVL

SEQ ID NO: 1865 - protein, 4 aa, Artificial Sequence
  Description of Artificial Sequence: Synthetic peptide
RGDS

SEQ ID NO: 1866 - RNA, 36 nt, Artificial Sequence; identical to SEQ ID NO: 66
  Description of Artificial Sequence: Synthetic oligonucleotide
  modified_base (1)..(20): a, c, u, g, unknown or other

SEQ ID NO: 1867 - RNA, 20 nt, Artificial Sequence
  Description of Artificial Sequence: Synthetic oligonucleotide
auaggaccagaugaagugau

SEQ ID NO: 1868 - RNA, 20 nt, Artificial Sequence
  Description of Artificial Sequence: Synthetic oligonucleotide
agagucucucagcugguaca

SEQ ID NO: 1869 - RNA, 20 nt, Artificial Sequence
  Description of Artificial Sequence: Synthetic oligonucleotide
gaguagcgcgagcacagcua

SEQ ID NO: 1870 - protein, 1386 aa, Artificial Sequence
  Description of Artificial Sequence: Synthetic polypeptide
MAPKKKRKVDKKYSIGLDIGTNSVGWAVITDEYKVPSKKFKVLGNTDRHSIKKNLIGALLFDSGETAEATRLKRTARRRYTRRKNRILYLQEIFSNEMAKVDDSFFHRLEESFLVEEDKKHERHPIFGNIVDEVAYHEKYPTIYHLRKKLVDSTDKADLRLIYLALAHMIKFRGHFLIEGDLNPDNSDVDKLFIQLVQTYNQLFEENPINASGVDAKAILSARLSKSRRLENLIAQLPGEKKNGLFGNLIALSLGLTPNFKSNFDLAEDAKLQLSKDTYDDDLDNLLAQIGDQYADLFLAAKNLSDAILLSDILRVNTEITKAPLSASMIKRYDEHHQDLTLLKALVRQQLPEKYKEIFFDQSKNGYAGYIDGGASQEEFYKFIKPILEKMDGTEELLVKLNREDLLRKQRTFDNGSIPHQIHLGELHAILRRQEDFYPFLKDNREKIEKILTFRIPYYVGPLARGNSRFAWMTRKSEETITPWNFEEVVDKGASAQSFIERMTNFDKNLPNEKVLPKHSLLYEYFTVYNELTKVKYVTEGMRKPAFLSGEQKKAIVDLLFKTNRKVTVKQLKEDYFKKIEEFDSVEISGVEDRFNASLGTYHDLLKIIKDKDFLDNEENEDILEDIVLTLTLFEDREMIEERLKTYAHLFDDKVMKQLKRRRYTGWGRLSRKLINGIRDKQSGKTILDFLKSDGFANRNFMQLIHDDSLTFKEDIQKAQVSGQGDSLHEHIANLAGSPAIKKGILQTVKVVDELVKVMGRHKPENIVIEMARENQTTQKGQKNSRERMKRIEEGIKELGSQILKEHPVENTQLQNEKLYLYYLQNGRDMYVDQELDINRLSDYDVDHIVPQSFLKDDSIDNKVLTRSDKNRGKSDNVPSEEVVKKMKNYWRQLLNAKLITQRKFDNLTKAERGGLSELDKAGFIKRQLVETRQITKHVAQILDSRMNTKYDENDKLIREVKVITLKSKLVSDFRKDFQFYKVREINNYHHAHDAYLNAVVGTALIKKYPKLESEFVYGDYKVYDVRKMIAKSEQEIGKATAKYFFYSNIMNFFKTEITLANGEIRKRPLIETNGETGEIVWDKGRDFATVRKVLSMPQVNIVKKTEVQTGGFSKESILPKRNSDKLIARKKDWDPKKYGGFDSPTVAYSVLVVAKVEKGKSKKLKSVKELLGITIMERSSFEKNPIDFLEAKGYKEVKKDLIIKLPKYSLFELENGRKRMLASAGELQKGNELALPSKYVNFLYLASHYEKLKGSPEDNEQKQLFVEQHKHYLDEIIEQISEFSKRVILADANLDKVLSAYNKHRDKPIREQAENIIHLFTLTNLGAPAAFKYFDTTIDRKRYTSTKEVLDATLIHQSITGLYETRIDLSQLGGDSRADHHHHHH

SEQ ID NO: 1871 - DNA, 5000 bp, Artificial Sequence
  Description of Artificial Sequence: Synthetic polynucleotide
  misc_feature (1)..(5000): This sequence may encompass 50-5000 nucleotides
  See specification as filed for detailed description of substitutions and preferred embodiments
aaaaaaaaaaaaaaaaaaaaaaaaaaaaaaaaaaaaaaaaaaaaaaaaaaaaaaaaaaaaaaaaaaaaaaaaaaaaaaaaaaaaaaaaaaaaaaaaaaaaaaaaaaaaaaaaaaaaaaaaaaaaaaaaaaaaaaaaaaaaaaaaaaaaaaaaaaaaaaaaaaaaaaaaaaaaaaaaaaaaaaaaaaaaaaaaaaaaaaaaaaaaaaaaaaaaaaaaaaaaaaaaaaaaaaaaaaaaaaaaaaaaaaaaaaaaaaaaaaaaaaaaaaaaaaaaaaaaaaaaaaaaaaaaaaaaaaaaaaaaaaaaaaaaaaaaaaaaaaaaaaaaaaaaaaaaaaaaaaaaaaaaaaaaaaaaaaaaaaaaaaaaaaaaaaaaaaaaaaaaaaaaaaaaaaaaaaaaaaaaaaaaaaaaaaaaaaaaaaaaaaaaaaaaaaaaaaaaaaaaaaaaaaaaaaaaaaaaaaaaaaaaaaaaaaaaaaaaaaaaaaaaaaaaaaaaaaaaaaaaaaaaaaaaaaaaaaaaaaaaaaaaaaaaaaaaaaaaaaaaaaaaaaaaaaaaaaaaaaaaaaaaaaaaaaaaaaaaaaaaaaaaaaaaaaaaaaaaaaaaaaaaaaaaaaaaaaaaaaaaaaaaaaaaaaaaaaaaaaaaaaaaaaaaaaaaaaaaaaaaaaaaaaaaaaaaaaaaaaaaaaaaaaaaaaaaaaaaaaaaaaaaaaaaaaaaaaaaaaaaaaaaaaaaaaaaaaaaaaaaaaaaaaaaaaaaaaaaaaaaaaaaaaaaaaaaaaaaaaaaaaaaaaaaaaaaaaaaaaaaaaaaaaaaaaaaaaaaaaaaaaaaaaaaaaaaaaaaaaaaaaaaaaaaaaaaaaaaaaaaaaaaaaaaaaaaaaaaaaaaaaaaaaaaaaaaaaaaaaaaaaaaaaaaaaaaaaaaaaaaaaaaaaaaaaaaaaaaaaaaaaaaaaaaaaaaaaaaaaaaaaaaaaaaaaaaaaaaaaaaaaaaaaaaaaaaaaaaaaaaaaaaaaaaaaaaaaaaaaaaaaaaaaaaaaaaaaaaaaaaaaaaaaaaaaaaaaaaaaaaaaaaaaaaaaaaaaaaaaaaaaaaaaaaaaaaaaaaaaaaaaaaaaaaaaaaaaaaaaaaaaaaaaaaaaaaaaaaaaaaaaaaaaaaaaaaaaaaaaaaaaaaaaaaaaaaaaaaaaaaaaaaaaaaaaaaaaaaaaaaaaaaaaaaaaaaaaaaaaaaaaaaaaaaaaaaaaaaaaaaaaaaaaaaaaaaaaaaaaaaaaaaaaaaaaaaaaaaaaaaaaaaaaaaaaaaaaaaaaaaaaaaaaaaaaaaaaaaaaaaaaaaaaaaaaaaaaaaaaaaaaaaaaaaaaaaaaaaaaaaaaaaaaaaaaaaaaaaaaaaaaaaaaaaaaaaaaaaaaaaaaaaaaaaaaaaaaaaaaaaaaaaaaaaaaaaaaaaaaaaaaaaaaaaaaaaaaaaaaaaaaaaaaaaaaaaaaaaaaaaaaaaaaaaaaaaaaaaaaaaaaaaaaaaaaaaaaaaaaaaaaaaaaaaaaaaaaaaaaaaaaaaaaaaaaaaaaaaaaaaaaaaaaaaaaaaaaaaaaaaaaaaaaaaaaaaaaaaaaaaaaaaaaaaaaaaaaaaaaaaaaaaaaaaaaaaaaaaaaaaaaaaaaaaaaaaaaaaaaaaaaaaaaaaaaaaaaaaaaaaaaaaaaaaaaaaaaaaaaaaaaaaaaaaaaaaaaaaaaaaaaaaaaaaaaaaaaaaaaaaaaaaaaaaaaaaaaaaaaaaaaaaaaaaaaaaaaaaaaaaaaaaaaaaaaaaaaaaaaaaaaaaaaaaaaaaaaaaaaaaaaaaaaaaaaaaaaaaaaaaaaaaaaaaaaaaaaaaaaaaaaaaaaaaaaaaaaaaaaaaaaaaaaaaaaaaaaaaaaaaaaaaaaaaaaaaaaaaaaaaaaaaaaaaaaaaaaaaaaaaaaaaaaaaaaaaaaaaaaaaaaaaaaaaaaaaaaaaaaaaaaaaaaaaaaaaaaaaaaaaaaaaaaaaaaaaaaaaaaaaaaaaaaaaaaaaaaaaaaaaaaaaaaaaaaaaaaaaaaaaaaaaaaaaaaaaaaaaaaaaaaaaaaaaaaaaaaaaaaaaaaaaaaaaaaaaaaaaaaaaaaaaaaaaaaaaaaaaaaaaaaaaaaaaaaaaaaaaaaaaaaaaaaaaaaaaaaaaaaaaaaaaaaaaaaaaaaaaaaaaaaaaaaaaaaaaaaaaaaaaaaaaaaaaaaaaaaaaaaaaaaaaaaaaaaaaaaaaaaaaaaaaaaaaaaaaaaaaaaaaaaaaaaaaaaaaaaaaaaaaaaaaaaaaaaaaaaaaaaaaaaaaaaaaaaaaaaaaaaaaaaaaaaaaaaaaaaaaaaaaaaaaaaaaaaaaaaaaaaaaaaaaaaaaaaaaaaaaaaaaaaaaaaaaaaaaaaaaaaaaaaaaaaaaaaaaaaaaaaaaaaaaaaaaaaaaaaaaaaaaaaaaaaaaaaaaaaaaaaaaaaaaaaaaaaaaaaaaaaaaaaaaaaaaaaaaaaaaaaaaaaaaaaaaaaaaaaaaaaaaaaaaaaaaaaaaaaaaaaaaaaaaaaaaaaaaaaaaaaaaaaaaaaaaaaaaaaaaaaaaaaaaaaaaaaaaaaaaaaaaaaaaaaaaaaaaaaaaaaaaaaaaaaaaaaaaaaaaaaaaaaaaaaaaaaaaaaaaaaaaaaaaaaaaaaaaaaaaaaaaaaaaaaaaaaaaaaaaaaaaaaaaaaaaaaaaaaaaaaaaaaaaaaaaaaaaaaaaaaaaaaaaaaaaaaaaaaaaaaaaaaaaaaaaaaaaaaaaaaaaaaaaaaaaaaaaaaaaaaaaaaaaaaaaaaaaaaaaaaaaaaaaaaaaaaaaaaaaaaaaaaaaaaaaaaaaaaaaaaaaaaaaaaaaaaaaaaaaaaaaaaaaaaaaaaaaaaaaaaaaaaaaaaaaaaaaaaaaaaaaaaaaaaaaaaaaaaaaaaaaaaaaaaaaaaaaaaaaaaaaaaaaaaaaaaaaaaaaaaaaaaaaaaaaaaaaaaaaaaaaaaaaaaaaaaaaaaaaaaaaaaaaaaaaaaaaaaaaaaaaaaaaaaaaaaaaaaaaaaaaaaaaaaaaaaaaaaaaaaaaaaaaaaaaaaaaaaaaaaaaaaaaaaaaaaaaaaaaaaaaaaaaaaaaaaaaaaaaaaaaaaaaaaaaaaaaaaaaaaaaaaaaaaaaaaaaaaaaaaaaaaaaaaaaaaaaaaaaaaaaaaaaaaaaaaaaaaaaaaaaaaaaaaaaaaaaaaaaaaaaaaaaaaaaaaaaaaaaaaaaaaaaaaaaaaaaaaaaaaaaaaaaaaaaaaaaaaaaaaaaaaaaaaaaaaaaaaaaaaaaaaaaaaaaaaaaaaaaaaaaaaaaaaaaaaaaaaaaaaaaaaaaaaaaaaaaaaaaaaaaaaaaaaaaaaaaaaaaaaaaaaaaaaaaaaaaaaaaaaaaaaaaaaaaaaaaaaaaaaaaaaaaaaaaaaaaaaaaaaaaaaaaaaaaaaaaaaaaaaaaaaaaaaaaaaaaaaaaaaaaaaaaaaaaaaaaaaaaaaaaaaaaaaaaaaaaaaaaaaaaaaaaaaaaaaaaaaaaaaaaaaaaaaaaaaaaaaaaaaaaaaaaaaaaaaaaaaaaaaaaaaaaaaaaaaaaaaaaaaaaaaaaaaaaaaaaaaaaaaaaaaaaaaaaaaaaaaaaaaaaaaaaaaaaaaaaaaaaaaaaaaaaaaaaaaaaaaaaaaaaaaaaaaaaaaaaaaaaaaaaaaaaaaaaaaaaaaaaaaaaaaaaaaaaaaaaaaaaaaaaaaaaaaaaaaaaaaaaaaaaaaaaaaaaaaaaaaaaaaaaaaaaaaaaaaaaaaaaaaaaaaaaaaaaaaaaaaaaaaaaaaaaaaaaaaaaaaaaaaaaaaaaaaaaaaaaaaaaaaaaaaaaaaaaaaaaaaaaaaaaaaaaaaaaaaaaaaaaaaaaaaaaaaaaaaaaaaaaaaaaaaaaaaaaaaaaaaaaaaaaaaaaaaaaaaaaaaaaaaaaaaaaaaaaaaaaaaaaaaaaaaaaaaaaaaaaaaaaaaaaaaaaaaaaaaaaaaaaaaaaaaaaaaaaaaaaaaaaaaaaaaaaaaaaaaaaaaaaaaaaaaaaaaaaaaaaaaaaaaaaaaaaaaaaaaaaaaaaaaaaaaaaaaaaaaaaaaaaaaaaaaaaaaaaaaaaaaaaaaaaaaaaaaaaaaaaaaaaaaaaaaaaaaaaaaaaaaaaaaaaaaaaaaaaaaaaaaaaaaaaaaaaaaaaaaaaaaaaaaaaaaaaaaaaaaaaaaaaaaaaaaaaaaaaaaaaaaaaaaaaaaaaaaaaaaaaaaaaaaaaaaaaaaaaaaaaaaaaaaaaaaaaaaaaaaaaaaaaaaaaaaaaaaaaaaaaaaaaaaaaaaaaaaaaaaaaaaaaaaaaaaaaaaaaaaaaaaaaaaaaaaaaaaaaaaaaaaaaaaaaaaaaaaaaaaaaaaaaaaaaaaaaaaaaaaaaaaaaaaaaaaaaaaaaaaaaaaaaaaaaaaaaaaaaaaaaaaaaaaaaaaaaaaaaaaaaaaaaaaaaaaaaaaaaaaaaaaaaaaaaaaaaaaaaaaaaaaaaaaaaaaaaaaaaaaaaaaaaaaaaaaaaaaaaaaaaaaaaaaaaaaaaaaaaaaaaaaaaaaaaaaaaaaaaaaaaaaaaaaaaaaaaaaaaaaaaaaaaaaaaaaaaaaaaaaaaaaaaaaaaaaaaaaaaaaaaaaaaaaaaaaaaaaaaaaaaaaaaaaaaaaaaaaaaaaaaaaaaaaaaaaaaaaaaaaaaaaaaaaaaaaaaaaaaaaaaaaaaaaaaaaaaaaaaaaaaaaaaaaaaaaaaaaaaaaaaaaaaaaaaaaaaaaaaaaaaaaaaaaaaaaaaaaaaaaaaaaaaaaaaaaaaaaaaaaaaaaaaaaaaaaaaaaaaaaaaaaaaaaaaaaaaaaaaaaaaaaaaaaaaaaaaaaaaaaaaaaaaaaaaaaaaaaaaaaaaaaaaaaaaaaaaaaaaaaaaaaaaaaaa

SEQ ID NO: 1872 - protein, 30 aa, Artificial Sequence
  Description of Artificial Sequence: Synthetic polypeptide
GGGGSGGGGSGGGGSGGGGSGGGGSGGGGS

SEQ ID NO: 1873 - DNA, 2000 bp, Artificial Sequence
  Description of Artificial Sequence: Synthetic polynucleotide
  misc_feature (1)..(2000): This sequence may encompass 50-2000 nucleotides
aaaaaaaaaaaaaaaaaaaaaaaaaaaaaaaaaaaaaaaaaaaaaaaaaaaaaaaaaaaaaaaaaaaaaaaaaaaaaaaaaaaaaaaaaaaaaaaaaaaaaaaaaaaaaaaaaaaaaaaaaaaaaaaaaaaaaaaaaaaaaaaaaaaaaaaaaaaaaaaaaaaaaaaaaaaaaaaaaaaaaaaaaaaaaaaaaaaaaaaaaaaaaaaaaaaaaaaaaaaaaaaaaaaaaaaaaaaaaaaaaaaaaaaaaaaaaaaaaaaaaaaaaaaaaaaaaaaaaaaaaaaaaaaaaaaaaaaaaaaaaaaaaaaaaaaaaaaaaaaaaaaaaaaaaaaaaaaaaaaaaaaaaaaaaaaaaaaaaaaaaaaaaaaaaaaaaaaaaaaaaaaaaaaaaaaaaaaaaaaaaaaaaaaaaaaaaaaaaaaaaaaaaaaaaaaaaaaaaaaaaaaaaaaaaaaaaaaaaaaaaaaaaaaaaaaaaaaaaaaaaaaaaaaaaaaaaaaaaaaaaaaaaaaaaaaaaaaaaaaaaaaaaaaaaaaaaaaaaaaaaaaaaaaaaaaaaaaaaaaaaaaaaaaaaaaaaaaaaaaaaaaaaaaaaaaaaaaaaaaaaaaaaaaaaaaaaaaaaaaaaaaaaaaaaaaaaaaaaaaaaaaaaaaaaaaaaaaaaaaaaaaaaaaaaaaaaaaaaaaaaaaaaaaaaaaaaaaaaaaaaaaaaaaaaaaaaaaaaaaaaaaaaaaaaaaaaaaaaaaaaaaaaaaaaaaaaaaaaaaaaaaaaaaaaaaaaaaaaaaaaaaaaaaaaaaaaaaaaaaaaaaaaaaaaaaaaaaaaaaaaaaaaaaaaaaaaaaaaaaaaaaaaaaaaaaaaaaaaaaaaaaaaaaaaaaaaaaaaaaaaaaaaaaaaaaaaaaaaaaaaaaaaaaaaaaaaaaaaaaaaaaaaaaaaaaaaaaaaaaaaaaaaaaaaaaaaaaaaaaaaaaaaaaaaaaaaaaaaaaaaaaaaaaaaaaaaaaaaaaaaaaaaaaaaaaaaaaaaaaaaaaaaaaaaaaaaaaaaaaaaaaaaaaaaaaaaaaaaaaaaaaaaaaaaaaaaaaaaaaaaaaaaaaaaaaaaaaaaaaaaaaaaaaaaaaaaaaaaaaaaaaaaaaaaaaaaaaaaaaaaaaaaaaaaaaaaaaaaaaaaaaaaaaaaaaaaaaaaaaaaaaaaaaaaaaaaaaaaaaaaaaaaaaaaaaaaaaaaaaaaaaaaaaaaaaaaaaaaaaaaaaaaaaaaaaaaaaaaaaaaaaaaaaaaaaaaaaaaaaaaaaaaaaaaaaaaaaaaaaaaaaaaaaaaaaaaaaaaaaaaaaaaaaaaaaaaaaaaaaaaaaaaaaaaaaaaaaaaaaaaaaaaaaaaaaaaaaaaaaaaaaaaaaaaaaaaaaaaaaaaaaaaaaaaaaaaaaaaaaaaaaaaaaaaaaaaaaaaaaaaaaaaaaaaaaaaaaaaaaaaaaaaaaaaaaaaaaaaaaaaaaaaaaaaaaaaaaaaaaaaaaaaaaaaaaaaaaaaaaaaaaaaaaaaaaaaaaaaaaaaaaaaaaaaaaaaaaaaaaaaaaaaaaaaaaaaaaaaaaaaaaaaaaaaaaaaaaaaaaaaaaaaaaaaaaaaaaaaaaaaaaaaaaaaaaaaaaaaaaaaaaaaaaaaaaaaaaaaaaaaaaaaaaaaaaaaaaaaaaaaaaaaaaaaaaaaaaaaaaaaaaaaaaaaaaaaaaaaaaaaaaaaaaaaaaaaaaaaaaaaaaaaaaaaaaaaaaaaaaaaaaaaaaaaaaaaaaaaaaaaaaaaaaaaaaaaaaaaaaaaaaaaaaaaaaaaaaaaaaaaaaaaaaaaaaaaaaaaaaaaaaaaaaaaaaaaaaaaaaaaaaaaaaaaaaaaaaaaaaaaaaaaaaaaaaaaaaaaaaaaaaaaaaaaaaaaaaaaaaaaaaaaaaaaaaaaaaaaaaaaaaaaaaaaaaaaaaaaaaaaaaaaaaaaaaaaaaaaaaaaaaaaaaaaaaaaaaaaaaa

1. A gRNA molecule comprising a targeting domain that is complementary to a sequence within a genomic region selected from chr1:151340619-151343198, chr1:151343321-151343462, chr1:151343660-151343902, chr1:151344176-151344298, chr1:151344396-151344556, chr1:151344707-151344867, chr1:151345085-151345208, chr1:151345907-151345981, chr1:151346184-151346353, chr1:151346461-151346626, and chr1:151347190-151347313, wherein the genomic region is according to human reference genome hg38.

2. A gRNA molecule comprising a targeting domain that is complementary to a sequence within a genomic region selected from chr13:36819181-36819977, chr13:36825407-36825555, and chr13:36827622-36829623, wherein the genomic region is according to human reference genome hg38, or a gRNA molecule comprising a targeting domain that is complementary to a sequence within a genomic region selected from chr16:10877379-10877398, wherein the genomic region is according to human reference genome hg38.

3. The gRNA molecule of either of claim 1 or 2, wherein the gRNA molecule comprises a tracr and crRNA, wherein the crRNA comprises the targeting domain.

4. The gRNA molecule of claim 1, wherein the targeting domain comprises any one of SEQ ID NO: 925-1316, 1317-1336, 1337-1376, 1377-1390, 1391-1410, 1411-1432, 1433-1445, 1446-1457, 1458-1495, 1496-1518, 1519-1536 or a fragment thereof.

5. The gRNA molecule of claim 2, wherein the targeting domain comprises any one of SEQ ID NO: 1537-1717, 1718-1727, 1728-1848 or a fragment thereof, or wherein the targeting domain comprises any one of SEQ ID NO: 1849 or a fragment thereof.

6. A plurality of gRNA molecules, comprising:
(a) at least one gRNA molecule comprising a targeting domain that is complementary to a region within a first target sequence selected from a molecule that regulates the expression of MHC II, optionally selected from HLA-DM, HLA-DO, HLA-DR, HLA-DQ, HLA-DP, CIITA, RFXANK, RFXAP, RFX1, RFX5, NF-YA, NF-YB, NF-YC, X2BP, and OCAB; and
(b) at least one gRNA molecule comprising a targeting domain that is complementary to a region within a second target sequence selected from a component of the T cell system, optionally selected from TRAC, TRBC1, TRBC2, CD247, CD3, CD3D, CD3E, CD3G, DCK, CD2, FKBP1A, and NR3C1.

7. The gRNA molecule of claim 6, wherein the gRNA molecule comprises a tracr and crRNA, wherein the crRNA comprises the targeting domain.

8. The plurality of gRNA molecules of claim 7, further comprising at least one additional gRNA molecule comprising a targeting domain that is complementary to a third target sequence selected from a region within a molecule that regulates the expression of MHC I, optionally selected from HLA-A, HLA-B, HLA-C, B2M, and NLRC5.

9. The plurality of gRNA molecules of claim 7 or 8, wherein the first target sequence is selected from one or more of CIITA, RFXAP, and RFX5.

10. The plurality of gRNA molecules of any one of claims 7-9, wherein the second target sequence is selected from any one of TRAC, TRBC1, CD3DEG, and TRBC2.

11. The plurality of gRNA molecules of claim 8, wherein the first target sequence is selected from one or more of CIITA, RFXAP, and RFX5; the second target sequence is selected from any one of TRAC, TRBC1, CD3DEG, and TRBC2; and the third target sequence is B2M.

12. The plurality of gRNA molecules of any one of claims 7-11, wherein the first target sequence is RFX5, and the targeting domain is complementary to a sequence within a genomic region selected from chr1:151340619-151343198, chr1:151343321-151343462, chr1:151343660-151343902, chr1:151344176-151344298, chr1:151344396-151344556, chr1:151344707-151344867, chr1:151345085-151345208, chr1:151345907-151345981, chr1:151346184-151346353, chr1:151346461-151346626, and chr1:151347190-151347313, wherein said genomic region is according to hg38.

13. The plurality of gRNA molecules of any one of claims 7-11, wherein the first target sequence is RFXAP, and the targeting domain is complementary to a sequence within a genomic region selected from chr13:36819181-36819977, chr13:36825407-36825555, and chr13:36827622-36829623, wherein said genomic region is according to hg38.

14. The plurality of gRNA molecules of any one of claims 7-11, wherein the first target sequence is CIITA, and the targeting domain is complementary to a sequence within a genomic region selected from chr16:10877379-10877398, wherein said genomic region is according to hg38.

15. The plurality of gRNA molecules of any one of claims 7-11, wherein the first target sequence is RFX5 or RFXAP, and the targeting domain is complementary to a sequence within a genomic region selected from chr1:151346191-151346216, chr13:36819493-36819518, chr13:36819686-36819711, chr13:36819687-36819712, chr13:36819688-36819713, chr13:36819809-36819834, and chr13:36819343-36819368.

16. The plurality of gRNA molecules of any of claims 7-11, wherein the targeting domain that is complementary to the first target sequence comprises any one of SEQ ID NO: 925-1316, 1317-1336, 1337-1376, 1377-1390, 1391-1410, 1411-1432, 1433-1445, 1446-1457, 1458-1495, 1496-1518, 1519-1536, 1537-1717, 1718-1727, 1728-1848, 1849 or a fragment thereof, or any sequence in Tables 1a-c.

17. The plurality of gRNA molecules of any one of claims 7-11, wherein the targeting domain that is complementary to the first target sequence comprises any one of SEQ ID NO: 925-1316, 1317-1336, 1337-1376, 1377-1390, 1391-1410, 1411-1432, 1433-1445, 1446-1457, 1458-1495, 1496-1518, 1519-1536, 1537-1717, 1718-1727, 1728-1848, SEQ ID NO: 1849 or a fragment thereof.

18. The plurality of gRNA molecules of any one of claims 7-11, wherein the targeting domain that is complementary to the first target sequence comprises any one of SEQ ID NO: 925-1316, 1317-1336, 1337-1376, 1377-1390, 1391-1410, 1411-1432, 1433-1445, 1446-1457, 1458-1495, 1496-1518, 1519-1536, 1537-1717, 1718-1727, 1728-1848, 1849 or a fragment thereof.

19. The plurality of gRNA molecules of any one of claims 7-11, wherein the targeting domain that is complementary to the first target sequence comprises any one of SEQ ID NO: 925-1316, 1317-1336, 1337-1376, 1377-1390, 1391-1410, 1411-1432, 1433-1445, 1446-1457, 1458-1495, 1496-1518, 1519-1536, 1537-1717, 1718-1727, 1728-1848, 1849 or a fragment thereof.

20. The plurality of gRNA molecules of any one of claims 7-11, wherein the targeting domain that is complementary to the first target sequence comprises any one of SEQ ID NO: 925-1316, 1317-1336, 1337-1376, 1377-1390, 1391-1410, 1411-1432, 1433-1445, 1446-1457, 1458-1495, 1496-1518, 1519-1536, 1537-1717, 1718-1727, 1728-1848, 1849 or a fragment thereof.

21. The gRNA molecule of any of claims 1-6 or the plurality of gRNA molecules of any of claims 7-20, wherein at least one of the targeting domains comprises 17, 18, 19 or, 20 consecutive nucleic acids of any one of the recited targeting domain sequences.

22. The gRNA molecule of any of claims 1-6 or the plurality of gRNA molecules of any of claims 7-20, wherein at least one of the targeting domains consists of 17, 18, 19, or 20 consecutive nucleic acids of any one of the recited targeting domain sequences.

23. The gRNA molecule or the plurality of gRNA molecules of claim 21 or 22, wherein the 17, 18, 19, or 20 consecutive nucleic acids of any one of the recited targeting domain sequences are the 17, 18, 19, or 20 consecutive nucleic acids disposed at the 3′ end of the recited targeting domain sequence.

24. The gRNA molecule or the plurality of gRNA molecules of claim 21 or 22, wherein the 17, 18, 19, or 20 consecutive nucleic acids of any one of the recited targeting domain sequences are the 17, 18, 19, or 20 consecutive nucleic acids disposed at the 5′ end of the recited targeting domain sequence.

25. The gRNA molecule or the plurality of gRNA molecules of claim 21 or 22, wherein the 17, 18, 19, or 20 consecutive nucleic acids of any one of the recited targeting domain sequences do not comprise either the 5′ or 3′ nucleic acid of the recited targeting domain sequence.

26. The gRNA molecule of any of claims 1-6 or the plurality of gRNA molecules of any of claims 7-20, wherein the targeting domain consists of the recited targeting domain sequence.

27. The gRNA molecule of any of claims 1-6 or the plurality of gRNA molecules of any of claims 7-20, wherein a portion of at least one crRNA and a portion of at least one tracr hybridize to form a flagpole comprising SEQ ID NO: 50 or SEQ ID NO: 51.

28. The gRNA molecule or the plurality of gRNA molecules of claim 27, wherein the flagpole further comprises a first flagpole extension, located 3′ to the crRNA portion of the flagpole, wherein said first flagpole extension comprises SEQ ID NO: 55.

29. The gRNA molecule or the plurality of gRNA molecules of claim 27 or 28, wherein the flagpole further comprises a second flagpole extension located 3′ to the crRNA portion of the flagpole and, if present, the first flagpole extension, wherein said second flagpole extension comprises SEQ ID NO: 57.

30. The gRNA molecule of any one of claims 1-6 or the plurality of gRNA molecules of any of claims 7-29, wherein at least one tracr comprises:
(a) SEQ ID NO: 87, optionally further comprising, at the 3′ end, an additional 1, 2, 3, 4, 5, 6, or 7 uracil (U) nucleotides;
(b) SEQ ID NO: 65; or
(c) SEQ ID NO: 84.

31. The gRNA molecule or the plurality of gRNA molecules of claim 30, wherein the crRNA portion of the flagpole comprises SEQ ID NO: 79 or SEQ ID NO: 80.

32. The gRNA molecule of any one of claims 1-6 or the plurality of gRNA molecules of any of claims 7-29, wherein the tracr comprises SEQ ID NO: 53 or SEQ ID NO: 54, and optionally, if a first flagpole extension is present, a first tracr extension, disposed 5′ to SEQ ID NO: 53 or SEQ ID NO: 54, said first tracr extension comprising SEQ ID NO: 56.

33. The gRNA molecule of any one of claims 1-6 or the plurality of gRNA molecules of any of claims 7-32, wherein at least one targeting domain and tracr are disposed on separate nucleic acid molecules.

34. The gRNA molecule of any one of claims 1-6 or the plurality of gRNA molecules of any of claims 7-25, wherein at least one crRNA comprises, from 5′ to 3′, [targeting domain]—:
(a) SEQ ID NO: 50;
(b) SEQ ID NO: 51;
(c) SEQ ID NO: 77;
(d) SEQ ID NO: 78;
(e) SEQ ID NO: 79;
(f) SEQ ID NO: 80; or
(g) SEQ ID NO: 81.

35. The gRNA molecule of any one of claims 1-6 or the plurality of gRNA molecules of any of claims 7-25 or 21, wherein at least one tracr comprises, from 5′ to 3′:
(a) SEQ ID NO: 53;
(b) SEQ ID NO: 54;
(c) SEQ ID NO: 82;
(d) SEQ ID NO: 83;
(e) SEQ ID NO: 65;
(f) SEQ ID NO: 84;
(g) SEQ ID NO: 87;
(h) SEQ ID NO: 76;
(i) SEQ ID NO: 85;
(j) SEQ ID NO: 86;
(k) any of (a) to (j), above, further comprising, at the 3′ end, at least 1, 2, 3, 4, 5, 6 or 7 uracil (U) nucleotides, e.g., 1, 2, 3, 4, 5, 6, or 7 uracil (U) nucleotides;
(l) any of (a) to (k), above, further comprising, at the 3′ end, at least 1, 2, 3, 4, 5, 6 or 7 adenine (A) nucleotides, e.g., 1, 2, 3, 4, 5, 6, or 7 adenine (A) nucleotides; or
(m) any of (a) to (l), above, further comprising, at the 5′ end (e.g., at the 5′ terminus), at least 1, 2, 3, 4, 5, 6 or 7 adenine (A) nucleotides, e.g., 1, 2, 3, 4, 5, 6, or 7 adenine (A) nucleotides.

36. The gRNA molecule of any one of claims 1-6 or the plurality of gRNA molecules of any of claims 7-25, wherein at least one targeting domain and tracr are disposed on separate nucleic acid molecules, and wherein the nucleic acid molecule comprising the targeting domain comprises SEQ ID NO: 79, optionally disposed immediately 3′ to the targeting domain, and the nucleic acid molecule comprising the tracr comprises, e.g., consists of, SEQ ID NO: 65.

37. The gRNA molecule or the plurality of gRNA molecules of claim 30 or 31, wherein at least one targeting domain and tracr are disposed on a single nucleic acid molecule, and wherein the tracr is disposed 3′ to the targeting domain.

38. The gRNA molecule or the plurality of gRNA molecules of claim 37, further comprising a loop, disposed 3′ to the targeting domain and 5′ to the tracr.

39. The gRNA molecule or the plurality of gRNA molecules of claim 38, wherein the loop comprises SEQ ID NO: 52.

40. The gRNA molecule of any one of claims 1-6 or the plurality of gRNA molecules of any of claims 7-25, wherein a gRNA molecule in the plurality comprises, from 5′ to 3′, [targeting domain]—:
(a) SEQ ID NO: 71;
(b) SEQ ID NO: 72;
(c) SEQ ID NO: 73;
(d) SEQ ID NO: 74;
(e) SEQ ID NO: 75; or
(f) any of (a) to (e), above, further comprising, at the 3′ end, 1, 2, 3, 4, 5, 6 or 7 uracil (U) nucleotides.

41. The gRNA molecule of any one of claims 1-6 or the plurality of gRNA molecules of any of claims 7-25, wherein the targeting domain and the tracr are disposed on a single nucleic acid molecule, and wherein said nucleic acid molecule comprises or consists of said targeting domain and SEQ ID NO: 71, optionally disposed immediately 3′ to said targeting domain.

42. The gRNA molecule of any one of claims 1-6 or the plurality of gRNA molecules of claims 7-25, wherein the targeting domain and the tracr are disposed on a single nucleic acid molecule, and wherein said nucleic acid molecule comprises or consists of said targeting domain and SEQ ID NO: 75, optionally disposed immediately 3′ to said targeting domain.

43. The gRNA molecule of any one of claims 1-6 or the plurality of gRNA molecules of any of claims 7-42, wherein at least one of the nucleic acid molecules comprising the gRNA molecule comprises:
(a) a, e.g., three, phosphorothioate modification(s) at the 3′ end of said nucleic acid molecule or molecules;
(b) a, e.g., three, phosphorothioate modification(s) at the 5′ end of said nucleic acid molecule or molecules;
(c) a, e.g., three, 2′-O-methyl modification(s) at the 3′ end of said nucleic acid molecule or molecules;
(d) a, e.g., three, 2′-O-methyl modification(s) at the 5′ end of said nucleic acid molecule or molecules;
(e) a 2′ O-methyl modification at each of the 4^{th}-to-terminal, 3_{rd}-to-terminal, and 2^{nd}-to-terminal 3′ residues of said nucleic acid molecule or molecules; or
(f) any combination thereof.

44. The gRNA molecule of any one of claims 1-6 or the plurality of gRNA molecules of any of claims 7-43, wherein when a CRISPR system (e.g., a ribonuclear protein complex (RNP) as described herein) comprising the gRNA molecule is introduced into a cell, an indel is formed at or near the target sequence complementary to the targeting domain of the gRNA molecule.

45. The gRNA molecule or the plurality of gRNA molecules of claim 44, wherein the indel comprises a deletion of 10 or greater than 10 nucleotides, optionally 11, 12, 13, 14, 15, 16, 17, 18, 19, 20, 21, 22, 23, 24, 25, 26, 27, 28, 29, 30, 31, 32, 33, 34, or 35 nucleotides.

46. The gRNA molecule of any one of claims 1-6 or the plurality of gRNA molecules of any of claims 7-45, wherein when a CRISPR system (e.g., an RNP as described herein) comprising the gRNA molecule is introduced into a population of cells, an indel is formed at or near the target sequence complementary to the targeting domain of the gRNA molecule in at least about 40%, e.g., at least about 50%, e.g., at least about 60%, e.g., at least about 70%, e.g., at least about 80%, e.g., at least about 90%, e.g., at least about 95%, e.g., at least about 96%, e.g., at least about 97%, e.g., at least about 98%, e.g., at least about 99%, of the cells of the population.

47. The gRNA molecule or the plurality of gRNA molecules of claim 45, wherein the indel comprising a deletion of 10 or greater than 10 nucleotides is detected in at least about 5%, optionally at least about 10%, 15%, 20%, 25%, 30% or more, of the cells of the population.

48. The gRNA molecule or the plurality of gRNA molecules of any one of claims 45-47, wherein the indel is as measured by next generation sequencing (NGS).

49. The gRNA molecule of any one of claims 1-6, wherein when a CRISPR system (e.g., an RNP as described herein) comprising the gRNA molecule is introduced into a cell, expression of a molecule that regulates the expression of MHC II, optionally selected from one or more of HLA-DM, HLA-DO, HLA-DR, HLA-DQ, HLA-DP, CIITA, RFXANK, RFXAP, RFX1, RFX5, NF-YA, NF-YB, NF-YC, X2BP, and OCAB, is reduced or eliminated in said cell.

50. The gRNA molecule of any one of claims 1-6, wherein when a CRISPR system (e.g., an RNP as described herein) comprising the gRNA molecule is introduced into a cell, a function of a molecule that regulates the expression of MHC II, optionally selected from one or more of HLA-DM, HLA-DO, HLA-DR, HLA-DQ, HLA-DP, CIITA, RFXANK, RFXAP, RFX1, RFX5, NF-YA, NF-YB, NF-YC, X2BP, and OCAB, is reduced or eliminated in said cell.

51. The gRNA molecule of claim 50, wherein the function of the molecule that regulates the expression of MHC II is reduced, e.g., by at least about 10%, 20%, 30%, 40% or 50%, but said function is not reduced by more than about 80%, or eliminated, in said cell.

52. The plurality of gRNA molecules of any of claims 7-48, wherein when a CRISPR system (e.g., an RNP as described herein) comprising the plurality of gRNA molecules is introduced into a cell, expression of at least one molecule that regulates the expression of MHC II, optionally selected from one or more of HLA-DM, HLA-DO, HLA-DR, HLA-DQ, HLA-DP, CIITA, RFXANK, RFXAP, RFX1, RFX5, NF-YA, NF-YB, NF-YC, X2BP, and OCAB, and at least one component of the T cell system, optionally selected from TRAC, TRBC1, TRBC2, CD247, CD3, CD3D, CD3E, CD3G, DCK, CD52, FKBP1A, and NR3C1, is reduced or eliminated in said cell.

53. The plurality of gRNA molecules of any of claims 7-48, wherein when a CRISPR system (e.g., an RNP as described herein) comprising the plurality of gRNA molecules is introduced into a cell, a function of at least one molecule that regulates the expression of MHC II, optionally selected from one or more of HLA-DM, HLA-DO, HLA-DR, HLA-DQ, HLA-DP, CIITA, RFXANK, RFXAP, RFX1, RFX5, NF-YA, NF-YB, NF-YC, X2BP, and OCAB, and at least one component of the T cell system, optionally selected from TRAC, TRBC1, TRBC2, CD247, CD3, CD3D, CD3E, CD3G, DCK, CD52, FKBP1A, and NR3C1, is reduced or eliminated in said cell.

54. The plurality of gRNA molecules of claim 53, wherein the function of the molecule that regulates the expression of MHC II is reduced, e.g., by at least about 10%, 20%, 30%, 40% or 50%, but said function is not reduced by more than about 80%, or eliminated, and the function of the component of the T cell system is reduced, e.g., by at least about 10%, 20%, 30%, 40% or 50%, but said function is not reduced by more than about 80%, or eliminated, in the cell.

55. The gRNA molecule or the plurality of gRNA molecules of any of claims 49-54, wherein when a CRISPR system (e.g., an RNP as described herein) comprising the gRNA molecule is introduced into a cell, no off-target indels are formed in said cell, e.g., as detectible by next generation sequencing and/or a nucleotide insertional assay.

56. The gRNA molecule or the plurality of gRNA molecules of any of claims 49-54, wherein when a CRISPR system (e.g., an RNP as described herein) comprising the gRNA molecule is introduced into a population of cells, an off-target indel is detected in no more than about 5%, e.g., no more than about 1%, e.g., no more than about 0.1%, e.g., no more than about 0.01%, of the cells of the population of cells e.g., as detectible by next generation sequencing and/or a nucleotide insertional assay.

57. A composition comprising the gRNA molecule or the plurality of gRNA molecules of any of claims 1-56.

58. The composition of claim 57, further comprising a Cas molecule.

59. The composition of claim 58, wherein the Cas molecule is a Cas9 molecule.

60. The composition of claim 59, wherein the Cas9 molecule is a catalytically active or inactive S. pyogenes Cas9.

61. The composition of claim 59, wherein the Cas9 molecule comprises any one of SEQ ID NO: 90 or SEQ ID NO: 111 to SEQ ID NO: 121 or a sequence comprising 1, 2, 3, 4, 5, 6, 7, 8, 9, or 10 amino acid modifications as compared to any one of SEQ ID NO: 90 or SEQ ID NO: 111 to SEQ ID NO: 121.

62. The composition of any of claims 58-61, wherein the gRNA molecule or the plurality of gRNA molecules and the Cas9 molecule are present in a ribonuclear protein complex (RNP).

63. The composition of any of claims 57-62, further comprising a template nucleic acid.

64. The composition of claim 63, wherein the template nucleic acid is double-stranded or single stranded.

65. The composition of any of claims 63-64, wherein the template nucleic acid is or is included in a vector.

66. The composition of any of claims 63-65, wherein the template nucleic acid is or is included in a vector that is different than a vector comprising at least one gRNA molecule.

67. The composition of any of claims 63-65, wherein the template nucleic acid is or is included in a vector that is the same vector that comprises at least one gRNA molecule.

68. The composition of claim 65, wherein the vector is a lentivirus vector, and AAV vector, an adenovirus vector, a plasmid, a minicircle or a nanoplasmid.

69. The composition of claim 68, wherein the vector is an AAV vector.

70. The composition of any of claims 63-69, wherein the template nucleic acid comprises at least one (e.g., at least a 5′ or at least a 3′) homology arm, wherein the homology arm comprises sequence homologous to sequence of a molecule that regulates the expression of MHC II.

71. The composition of claim 70, wherein the template nucleic acid comprises both a 5′ and a 3′ homology arm, wherein the homology arm comprises sequence homologous to sequence of a molecule that regulates the expression of MHC II.

72. The composition of any of claims 63-71, wherein the template nucleic acid comprises nucleic acid encoding a chimeric antigen receptor (CAR).

73. The composition of claim 72, wherein the CAR is one or more of:
(a) a CD22 CAR;
(b) a CD19 CAR; and
(c) a BCMA CAR.

74. The composition of claim 73, wherein the CAR is a CD19 CAR comprising an antigen binding domain comprising any one of SEQ ID NO: 160 to SEQ ID NO: 172 or SEQ ID NO: 175 or comprises any one of SEQ ID NO: 185 to SEQ ID NO: 197.

75. The composition of any of claims 73-74, wherein the CAR is a CD22 CAR and comprises any one of SEQ ID NO: 185 to SEQ ID NO: 197.

76. The composition of claim 73, wherein the CAR is a BCMA CAR comprising an antigen binding domain comprising any one of SEQ ID NO: 239 to SEQ ID NO: 412.

77. The composition of any of claims 73 and 76, wherein the CAR is a BCMA CAR and comprises any one of SEQ ID NO: 849 to SEQ ID NO: 863 or SEQ ID NO: 879 to SEQ ID NO: 899, e.g., comprises SEQ ID NO: 859.

78. The composition of any of claims 67-77, wherein the template nucleic acid comprises a promotor, e.g., an EF1-alpha promoter, operably linked to the nucleic acid sequence encoding the CAR.

79. The composition of any of claims 63-78, wherein the template nucleic acid sequence is provided on an AAV vector; the template nucleic acid sequence comprises a nucleic acid sequence encoding one or more CAR selected from a CD19 CAR a BCMA CAR, and a CD22 CAR; the template nucleic acid sequence further comprises at least one homology arm comprising sequence homologous to sequence of a molecule that regulates the expression of MHC II; and at least one gRNA molecule comprises a targeting domain complementary to a sequence within a genomic region (according to hg38) of chr1:151340619-151343198, chr1:151343321-151343462, chr1:151343660-151343902, chr1:151344176-151344298, chr1:151344396-151344556, chr1:151344707-151344867, chr1:151345085-151345208, chr1:151345907-151345981, chr1:151346184-151346353, chr1:151346461-151346626, chr1:151347190-151347313, chr13:36819181-36819977, chr13:36825407-36825555, chr13:36827622-36829623, or chr16:10877379-10877398.

80. The composition of any of claims 63-78, wherein the template nucleic acid sequence comprises a nucleic acid sequence encoding a CAR selected from a CD19 CAR, a BCMA CAR, and a CD22 CAR; the template nucleic acid sequence further comprises at least one homology arm comprising sequence homologous to sequence of a molecule that regulates the expression of MHC II; and at least one gRNA molecule comprises a targeting domain complementary to a sequence within a genomic region (according to hg38) of chr1:151340619-151343198, chr1:151343321-151343462, chr1:151343660-151343902, chr1:151344176-151344298, chr1:151344396-151344556, chr1:151344707-151344867, chr1:151345085-151345208, chr1:151345907-151345981, chr1:151346184-151346353, chr1:151346461-151346626, chr1:151347190-151347313, chr13:36819181-36819977, chr13:36825407-36825555, chr13:36827622-36829623, or chr16:10877379-10877398.

81. The composition of any of claims 63-78, wherein the template nucleic acid sequence is provided on an AAV vector; the template nucleic acid sequence further comprises at least one homology arm comprising sequence homologous to sequence of a molecule that regulates the expression of MHC II; and at least one gRNA molecule comprises a targeting domain complementary to a sequence within a genomic region (according to hg38) of chr1:151340619-151343198, chr1:151343321-151343462, chr1:151343660-151343902, chr1:151344176-151344298, chr1:151344396-151344556, chr1:151344707-151344867, chr1:151345085-151345208, chr1:151345907-151345981, chr1:151346184-151346353, chr1:151346461-151346626, chr1:151347190-151347313, chr13:36819181-36819977, chr13:36825407-36825555, chr13:36827622-36829623, or chr16:10877379-10877398.

82. The composition of any of claims 63-78, wherein the template nucleic acid sequence is provided on an AAV vector; the template nucleic acid sequence comprises a nucleic acid sequence encoding a CAR selected from a CD19 CAR, a BCMA CAR, and a CD22 CAR; and at least one gRNA molecule comprises a targeting domain complementary to a sequence within a genomic region (according to hg38) of chr1:151340619-151343198, chr1:151343321-151343462, chr1:151343660-151343902, chr1:151344176-151344298, chr1:151344396-151344556, chr1:151344707-151344867, chr1:151345085-151345208, chr1:151345907-151345981, chr1:151346184-151346353, chr1:151346461-151346626, chr1:151347190-151347313, chr13:36819181-36819977, chr13:36825407-36825555, chr13:36827622-36829623, or chr16:10877379-10877398.

83. The composition of any of claims 63-78, wherein the template nucleic acid sequence is provided on an AAV vector; the template nucleic acid sequence comprises a nucleic acid sequence encoding a CAR selected from a CD19 CAR, a BCMA CAR, and a CD22 CAR; the template nucleic acid sequence further comprises at least one homology arm comprising sequence homologous to sequence of a molecule that regulates the expression of MHC II; and at least one gRNA molecule comprises a targeting domain complementary to a sequence within a genomic region (according to hg38) of chr1:151340619-151343198, chr1:151343321-151343462, chr1:151343660-151343902, chr1:151344176-151344298, chr1:151344396-151344556, chr1:151344707-151344867, chr1:151345085-151345208, chr1:151345907-151345981, chr1:151346184-151346353, chr1:151346461-151346626, chr1:151347190-151347313, chr13:36819181-36819977, chr13:36825407-36825555, chr13:36827622-36829623, or chr16:10877379-10877398.

84. The composition of any of claims 63-78, wherein the template nucleic acid sequence comprises a nucleic acid sequence encoding a CAR selected from a CD19 CAR, a BCMA CAR, and a CD22 CAR; and at least one gRNA molecule comprises a targeting domain complementary to a sequence within a genomic region (according to hg38) of chr1:151340619-151343198, chr1:151343321-151343462, chr1:151343660-151343902, chr1:151344176-151344298, chr1:151344396-151344556, chr1:151344707-151344867, chr1:151345085-151345208, chr1:151345907-151345981, chr1:151346184-151346353, chr1:151346461-151346626, chr1:151347190-151347313, chr13:36819181-36819977, chr13:36825407-36825555, chr13:36827622-36829623, or chr16:10877379-10877398.

85. The composition of any of claims 63-78, the template nucleic acid sequence comprises at least one homology arm comprising sequence homologous to sequence of a molecule that regulates the expression of MHC II; and at least one gRNA molecule comprises a targeting domain complementary to a sequence within a genomic region (according to hg38) of chr1:151340619-151343198, chr1:151343321-151343462, chr1:151343660-151343902, chr1:151344176-151344298, chr1:151344396-151344556, chr1:151344707-151344867, chr1:151345085-151345208, chr1:151345907-151345981, chr1:151346184-151346353, chr1:151346461-151346626, chr1:151347190-151347313, chr13:36819181-36819977, chr13:36825407-36825555, chr13:36827622-36829623, or chr16:10877379-10877398.

86. The composition of any one of claims 57-85, further comprising at least one additional gRNA molecule, wherein each gRNA molecule of the composition is complementary to a different target sequence.

87. The composition of claim 86, further comprising at least one additional gRNA molecule, wherein each gRNA molecule of the composition is complementary to target sequences within different genes.

88. The composition of claim 86, wherein at least two gRNA molecules of the composition are complementary to target sequences within the same genomic region.

89. The composition of claim 87, wherein the at least one additional gRNA molecule comprises a targeting domain complementary to a target sequence of an inhibitory molecule (e.g., PDCD1).

90. The composition of any of claims 57-89, formulated in a medium suitable for intracellular delivery, optionally by electroporation.

91. The composition of any of claims 57-90, wherein each of said gRNA molecules is in a RNP complex with a Cas9 molecule, and optionally wherein each of said RNP complexes is at a concentration of less than about 10 uM, e.g., less than about 3 uM, e.g., less than about 1 uM, e.g., less than about 0.5 uM, e.g., less than about 0.3 uM, e.g., less than about 0.1 uM.

92. A nucleic acid sequence that encodes at least one gRNA molecule of any of claims 1-56 or some or all components of a composition of any of claims 57-91 and 178.

93. A vector comprising the nucleic acid of claim 92.

94. The vector of claim 93, wherein in the vector is selected from the group consisting of a lentiviral vector, an adenoviral vector, an adeno-associated viral (AAV) vector, a herpes simplex virus (HSV) vector, a plasmid, a minicircle, a nanoplasmid, and an RNA vector.

95. A method of altering a target sequence in a cell, comprising contacting said cell with:
(a) the gRNA molecule or the plurality of gRNA molecules of any of claims 1-56 and a Cas9 molecule;
(b) the gRNA molecule or the plurality of gRNA molecules of any of claims 1-56 and nucleic acid encoding a Cas9 molecule;
(c) nucleic acid encoding the gRNA molecule or the plurality of gRNA molecules of any of claims 1-56 and a Cas9 molecule;
(d) nucleic acid encoding the gRNA molecule, or the plurality of gRNA molecules of any of claims 1-56 and nucleic acid encoding a Cas9 molecule;
(e) any of (a) to (d), above, and a template nucleic acid, e.g., a template nucleic acid as described in any of claims 63-72;
(f) the composition of any of claims 57-91 and 178-180; or
(g) the vector of any of claims 93-94.

96. The method of claim 95, wherein the gRNA molecule or the plurality of gRNA molecules of any of claims 1-56 or the nucleic acid encoding the gRNA molecule or the plurality of gRNA molecules of any of claims 1-56, and the Cas9 molecule or nucleic acid encoding the Cas9 molecule, are formulated in a single composition.

97. The method of claim 95 or 96, wherein the composition comprises a template nucleic acid, e.g., a template nucleic acid as described in any of claims 63-72, and the template nucleic acid is formulated in a separate composition from the gRNA molecule or the plurality of gRNA molecules of any of claims 1-56 or nucleic acid encoding the gRNA molecule or the plurality of gRNA molecules of any of claims 1-56 and the Cas9 molecule or nucleic acid encoding the Cas9 molecule.

98. The method of claim 97, wherein the more than one compositions are delivered sequentially.

99. The method of any of claims 95-98, wherein the method results in insertion of at least a portion of the template nucleic acid at or near the target sequence of the gRNA molecule or the plurality of gRNA molecules of any of claims 1-56.

100. The method of claim 99, wherein said insertion occurs at only at one allele.

101. A method of engineering a cell to express a chimeric antigen receptor (CAR), comprising:
(a) introducing into said cell a CRISPR system comprising the gRNA molecule or the plurality of gRNA molecules of any of claims 1-56 or the composition of any of claims 57-91 and 178-180; and
(b) introducing into said cell a template nucleic acid comprising nucleic acid sequence encoding a CAR;
wherein said nucleic acid sequence encoding a CAR is integrated into the genome at or near the target sequence of said gRNA molecule.

102. The method of claim 101, further comprising introducing into said cell one or more CRISPR systems comprising one or more gRNA molecules complementary to a target sequence of an inhibitory molecule.

103. The method of any of claims 95-102, wherein the cell is an animal cell.

104. The method of any of claims 95-103, wherein the cell is a mammalian, primate, or human cell.

105. The method of claim 104, wherein the cell is an immune effector cell (e.g., a population of immune effector cells).

106. The method of claim 105, wherein the immune effector cell is a T cell or NK cell, e.g., a T cell, e.g., a CD4+ T cell, a CD8+ T cell, or a combination thereof.

107. The method of any of claims 101-102, wherein the CAR is one or more of:
(a) a CD22 CAR, e.g., as described herein;
(b) a CD19 CAR, e.g., as described in herein; and
(c) a BCMA CAR, e.g., as described herein.

108. The method of claim 107, wherein the CAR is a CD19 CAR comprising an antigen binding domain comprising any one of SEQ ID NO: 160 to SEQ ID NO: 172 or SEQ ID NO: 175 or any one of SEQ ID NO: 185 to SEQ ID NO: 197.

109. The method of any of claims 107-108, wherein the CAR is a CD22 CAR and comprises any one of SEQ ID NO: 1850 to SEQ ID NO: 1864, SEQ ID NO: 834 or any of the sequences in Tables EE-GG.

110. The method of claim 107, wherein the CAR is a BCMA CAR comprising an antigen binding domain comprising any one of SEQ ID NO: 239 to SEQ ID NO: 412.

111. The method of any of claims 107 and 110, wherein the CAR is a BCMA CAR and comprises any one of SEQ ID NO: 849 to SEQ ID NO: 863 or SEQ ID NO: 879 to SEQ ID NO: 899, e.g., comprises SEQ ID NO: 859.

112. The method of any of claims 95-111, wherein the cell is autologous or allogeneic with respect to a patient to be administered said cell.

113. A cell, altered by the method of any of claims 95-112.

114. A cell, comprising the gRNA molecule or the plurality of gRNA molecules of any of claims 1-56, or the composition of any of claims 57-91 or 178-180, the nucleic acid of claim 92, or the vector of any of claims 93-94.

115. The cell of any of claims 113-114, wherein the cell is an animal cell, optionally a mammalian, primate, or human cell.

116. The cell of claim 115, wherein the cell is an immune effector cell or a population of immune effector cells), optionally a T cell or NK cell, optionally a T cell, optionally a CD4+ T cell, a CD8+ T cell, or a combination thereof.

117. The cell of any of claims 113-116, wherein the cell has reduced or eliminated expression of an inhibitory molecule, a component of the T cell receptor (e.g., TRAC, TRBC1, TRBC2, CD3E, CD3D, or CD3G), B2M, CIITA, or combinations thereof, e.g., relative to an unmodified cell of the same type.

118. The cell of any of claims 113-117, wherein the cell comprises nucleic acid sequence encoding a chimeric antigen receptor (CAR) integrated into the genome at chr1:151340619-151343198, chr1:151343321-151343462, chr1:151343660-151343902, chr1:151344176-151344298, chr1:151344396-151344556, chr1:151344707-151344867, chr1:151345085-151345208, chr1:151345907-151345981, chr1:151346184-151346353, chr1:151346461-151346626, chr1:151347190-151347313, chr13:36819181-36819977, chr13:36825407-36825555, chr13:36827622-36829623, and chr16:10877379-10877398.

119. The cell of any of claims 113-118, wherein the cell comprises reduced or eliminated expression and/or reduced or eliminated function of a molecule that regulates the expression of MHC II relative to the level of expression and/or function of an unaltered cell of the same cell type.

120. The cell of any of claims 113-119, wherein the cell is a T cell and exhibits:
(a) enhanced proliferative capacity;
(b) enhanced cytotoxicity;
(c) a less-exhausted phenotype (e.g., reduced expression of an inhibitory molecule, e.g., PD1, TIM3, LAG3, PD-L1, or combinations thereof); and/or
(d) a Tscm phenotype (e.g., is CD45RA+CD62L+CD27+CD95+),
relative to an unaltered cell of similar type.

121. The cell of any of claims 113-120, wherein the cell is autologous with respect to a patient to be administered said cell.

122. The cell of any of claims 113-120, wherein the cell is allogeneic with respect to a patient to be administered said cell.

123. A modified cell which has reduced or eliminated expression and/or function of at least one molecule that regulates the expression of MHC II relative to an unmodified cell of the same type, and comprises heterologous nucleic acid sequence (e.g., nucleic acid sequence encoding a chimeric antigen receptor) integrated at a site within a genomic region of the molecule that regulates the expression of MHC II, wherein the site within the genomic region is selected from any one of: chr1:151340619-151343198, chr1:151343321-151343462, chr1:151343660-151343902, chr1:151344176-151344298, chr1:151344396-151344556, chr1:151344707-151344867, chr1:151345085-151345208, chr1:151345907-151345981, chr1:151346184-151346353, chr1:151346461-151346626, chr1:151347190-151347313, chr13:36819181-36819977, chr13:36825407-36825555, chr13:36827622-36829623, and chr16:10877379-10877398, wherein the genomic region is according to human reference genome hg38.

124. A modified cell which has reduced or eliminated expression and/or function of at least one molecule that regulates the expression of MHC II relative to an unmodified cell of the same type, optionally selected from HLA-DM, HLA-DO, HLA-DR, HLA-DQ, HLA-DP, CIITA, RFXANK, RFXAP, RFX1, RFX5, NF-YA, NF-YB, NF-YC, X2BP, and OCAB, and at least one component of the T cell system, optionally selected from TRAC, TRBC1, TRBC2, CD247, CD3, CD3D, CD3E, CD3G, DCK, CD52, FKBP1A, and NR3C1.

125. The modified cell of claim 124, further comprising a heterologous nucleic acid sequence (e.g., nucleic acid sequence encoding a chimeric antigen receptor (CAR)) integrated at a site within a genomic region of the molecule that regulates the expression of MHC II, wherein the site within the genomic region is selected from any one of: chr1:151340619-151343198, chr1:151343321-151343462, chr1:151343660-151343902, chr1:151344176-151344298, chr1:151344396-151344556, chr1:151344707-151344867, chr1:151345085-151345208, chr1:151345907-151345981, chr1:151346184-151346353, chr1:151346461-151346626, chr1:151347190-151347313, chr13:36819181-36819977, chr13:36825407-36825555, chr13:36827622-36829623, and chr16:10877379-10877398, wherein the genomic region is according to human reference genome hg38, and optionally wherein the CAR is one or more of:
(a) a CD22 CAR, e.g., as described herein;
(b) a CD19 CAR, e.g., as described in herein; or
(c) a BCMA CAR, e.g., as described herein.

126. A modified cell which has reduced or eliminated expression and/or function of at least one molecule that regulates the expression of MHC II relative to an unmodified cell of the same type, optionally selected from HLA-DM, HLA-DO, HLA-DR, HLA-DQ, HLA-DP, CIITA, RFXANK, RFXAP, RFX1, RFX5, NF-YA, NF-YB, NF-YC, X2BP, and OCAB; at least one component of the T cell system, optionally selected from TRAC, TRBC1, TRBC2, CD247, CD3, CD3D, CD3E, CD3G, DCK, CD52, FKBP1A, and NR3C1; and at least one molecule that regulates the expression of MHC I, optionally selected from HLA-A, HLA-B, HLA-C, B2M, and NLRC5.

127. The modified cell of claim 126, further comprising a heterologous nucleic acid sequence (e.g., nucleic acid sequence encoding a chimeric antigen receptor (CAR)) integrated at a site within a genomic region of the molecule that regulates the expression of MHC II, wherein the site within the genomic region is selected from any one of: chr1:151340619-151343198, chr1:151343321-151343462, chr1:151343660-151343902, chr1:151344176-151344298, chr1:151344396-151344556, chr1:151344707-151344867, chr1:151345085-151345208, chr1:151345907-151345981, chr1:151346184-151346353, chr1:151346461-151346626, chr1:151347190-151347313, chr13:36819181-36819977, chr13:36825407-36825555, chr13:36827622-36829623, and chr16:10877379-10877398, wherein the genomic region is according to human reference genome hg38, and optionally wherein the CAR is one or more of:
(a) a CD22 CAR, e.g., as described herein;
(b) a CD19 CAR, e.g., as described in herein; or
(c) a BCMA CAR e.g., as described herein.

128. The cell of any of claims 124-127, wherein the cell has (a) reduced or eliminated expression and/or function of at least one component of the T cell system and/or (b) reduced or eliminated expression and/or function of at least one molecule that regulates the expression of MHC I relative to an unmodified cell of the same type.

129. The cell of any one of claims 123-128, wherein the cell has reduced or eliminated expression and/or function of at least one of CIITA, RFXAP, or RFX5.

130. The cell of any one of claims 123-129, wherein the cell is an animal cell.

131. The cell of claim 130, wherein the cell is a mammalian, primate, or human cell.

132. The cell of any of claims 123-131, wherein the cell is an immune effector cell (e.g., a population of immune effector cells).

133. The cell of claim 132, wherein the immune effector cell is a T cell or NK cell, e.g., a T cell, e.g., a CD4+ T cell, a CD8+ T cell, or a combination thereof.

134. The cell of any of claims 123-133, wherein the cell expresses a CAR.

135. The cell of claim 134, wherein the CAR is a CD22 CAR, CD19 CAR, or a BCMA CAR, or a combination thereof.

136. The cell of claim 135, wherein the CAR is a CD19 CAR comprising an antigen binding domain comprising any one of SEQ ID NO: 160 to SEQ ID NO: 172 or SEQ ID NO: 175 or any one of SEQ ID NO: 185 to SEQ ID NO: 197.

137. The cell of claim 135 or 136, wherein the CAR is a CD22 CAR and comprises any one of SEQ ID NO: 185 to SEQ ID NO: 197.

138. The cell of claim 135, wherein the CAR is a BCMA CAR comprising an antigen binding domain comprising any one of SEQ ID NO: 239 to SEQ ID NO: 412.

139. The cell of any of claims 135-138, wherein the CAR is a BCMA CAR and comprises any one of SEQ ID NO: 849 to SEQ ID NO: 863 or SEQ ID NO: 879 to SEQ ID NO: 899, e.g., comprises SEQ ID NO: 859.

140. The cell of any of claims 123-139, wherein the cell is autologous or allogeneic with respect to a patient to be administered said cell.

141. A method of providing an anti-tumor immunity in a subject, the method comprising administering to the subject an effective amount of a cell of any of claims 113-140 and 181-183.

142. A method of treating a subject having a disease associated with expression of a tumor antigen, optionally a proliferative disease, a precancerous condition, a cancer, or a non-cancer related indication associated with expression of the tumor antigen, the method comprising administering to the subject an effective amount of a cell of any of claims 113-140 and 181-183.

143. The method of claim 142, wherein the disease associated with expression of a tumor antigen is cancer or a non-cancer related indication.

144. The method of claim 143, wherein the disease is cancer selected from colon cancer, rectal cancer, renal-cell carcinoma, liver cancer, non-small cell carcinoma of the lung, cancer of the small intestine, cancer of the esophagus, melanoma, bone cancer, pancreatic cancer, skin cancer, cancer of the head or neck, cutaneous or intraocular malignant melanoma, uterine cancer, ovarian cancer, rectal cancer, cancer of the anal region, stomach cancer, testicular cancer, carcinoma of the fallopian tubes, carcinoma of the endometrium, carcinoma of the cervix, carcinoma of the vagina, carcinoma of the vulva, Hodgkin's Disease, non-Hodgkin's lymphoma, cancer of the endocrine system, cancer of the thyroid gland, cancer of the parathyroid gland, cancer of the adrenal gland, sarcoma of soft tissue, cancer of the urethra, cancer of the penis, solid tumors of childhood, cancer of the bladder, cancer of the kidney or ureter, carcinoma of the renal pelvis, neoplasm of the central nervous system (CNS), primary CNS lymphoma, tumor angiogenesis, spinal axis tumor, brain stem glioma, pituitary adenoma, Kaposi's sarcoma, epidermoid cancer, squamous cell cancer, T-cell lymphoma, environmentally induced cancers, chronic lymphocytic leukemia (CLL), acute leukemias, acute lymphoid leukemia (ALL), B-cell acute lymphoid leukemia (B-ALL), T-cell acute lymphoid leukemia (T-ALL), chronic myelogenous leukemia (CML), acute myeloid leukemia (AML), B cell prolymphocytic leukemia, blastic plasmacytoid dendritic cell neoplasm, Burkitt's lymphoma, diffuse large B cell lymphoma, follicular lymphoma, hairy cell leukemia, small cell- or a large cell-follicular lymphoma, malignant lymphoproliferative conditions, MALT lymphoma, mantle cell lymphoma, marginal zone lymphoma, multiple myeloma, myelodysplasia and myelodysplastic syndrome, Hodgkin's lymphoma, plasmablastic lymphoma, plasmacytoid dendritic cell neoplasm, Waldenstrom macroglobulinemia, and pre-leukemia, combinations of said cancers, and metastatic lesions of said cancers.

145. The method of claim 144, wherein the cancer is acute lymphoid leukemia (ALL).

146. The method of claim 144, wherein the cancer is pediatric ALL.

147. The method of claim 144, wherein the cancer is diffuse large B cell lymphoma.

148. The method of claim 144, wherein the cancer is chronic lymphocytic leukemia.

149. The method of claim 144, wherein the cancer is follicular lymphoma.

150. The method of claim 144, wherein the cancer is Hodgkin lymphoma.

151. The method of claim 144, wherein the cancer is non-Hodgkin lymphoma.

152. The method of any of claims 141-151, wherein the method further comprises administering a chemotherapeutic agent.

153. The method of claim 152, wherein the chemotherapeutic agent is cyclophosphamide, fludarabine, or cyclophosphamide and fludarabine.

154. The method of any of claims 141-153, wherein the method comprises administering a lymphodepleting agent or immunosuppressant prior to administering to the subject an effective amount of the cell of any of claims 113-140 and 181-183.

155. A population of cells comprising the cell of any of claims 113-140, wherein at least about 30% of the cells, or at least about 40%, 50%, 60%, 70,%, 80% or 90% of the cells, are a cell according to any of claims 113-140 and 181-183.

156. A gene editing system which binds a plurality of sequences selected from:
(a) at least one molecule that regulates the expression of MHC II, optionally selected from HLA-DM, HLA-DO, HLA-DR, HLA-DQ, HLA-DP, CIITA, RFXANK, RFXAP, RFX1, RFX5, NF-YA, NF-YB, NF-YC, X2BP, and OCAB; and
(b) at least one component of the T cell system, optionally selected from TRAC, TRBC1, TRBC2, CD247, CD3, CD3D, CD3E, CD3G, DCK, CD52, FKBP1A, and NR3C1.

157. The gene editing system of claim 156, wherein the sequence of the molecule that regulates the expression of MHC II is a sequence within a genomic region selected from chr1:151340619-151343198, chr1:151343321-151343462, chr1:151343660-151343902, chr1:151344176-151344298, chr1:151344396-151344556, chr1:151344707-151344867, chr1:151345085-151345208, chr1:151345907-151345981, chr1:151346184-151346353, chr1:151346461-151346626, chr1:151347190-151347313, chr13:36819181-36819977, chr13:36825407-36825555, chr13:36827622-36829623, and chr16:10877379-10877398, wherein the genomic region is according to hg38.

158. The gene editing system of claim 157, wherein the genomic region is chr1:151346191-151346216, chr13:36819493-36819518, chr13:36819686-36819711, chr13:36819687-36819712, chr13:36819688-36819713, chr13:36819809-36819834, and chr13:36819343-36819368.

159. The gene editing system of any of claims 156-158, wherein the gene editing system is a zinc finger nuclease (ZFN) gene editing system, a TALEN gene editing system, a CRISPR gene editing system, or a meganuclease gene editing system.

160. The gene editing system of any of claims 156-159, wherein the gene editing system further comprises a template nucleic acid.

161. The gene editing system of claim 160, wherein the template nucleic acid comprises nucleic acid sequence encoding a CAR.

162. The gene editing system of claim 161, wherein when said gene editing system (and/or nucleic acid sequence encoding one or more components of the gene editing system) is introduced into a cell, the nucleic acid sequence encoding the CAR is integrated into the genome of said cell at or near the sequence of HLA-DM, HLA-DO, HLA-DR, HLA-DQ, HLA-DP, CIITA, RFXANK, RFXAP, RFX1, RFX5, NF-YA, NF-YB, NF-YC, X2BP, OCAB, HLA-A, HLA-B, HLA-C, B2M, NLRC5, TRAC, TRBC1, TRBC2, CD247, CD3, CD3D, CD3E, CD3G, DCK, CD52, FKBP1A, and/or or NR3C1 bound by said genome editing system.

163. A cell modified by the gene editing system of any of claims 156-162.

164. A cell comprising the gene editing system of any of claims 156-162.

165. The gRNA molecule or the plurality of gRNA molecules of any of claims 1-56, a composition of any of claims 57-91, a nucleic acid of claim 92, a vector of any of claims 93-94, a cell (or population of cells) of any of claims 113-140 or 155, or a gene editing system of any of claims 156-162, for use as a medicament.

166. A gRNA molecule or the plurality of gRNA molecules of any of claims 1-56, a composition of any of claims 57-91, a nucleic acid of claim 92, a vector of any of claims 93-94, a cell (or population of cells) of any of claims 113-140 or 155, or a gene editing system of any of claims 156-162, for use in the manufacture of a medicament.

167. A gRNA molecule or the plurality of gRNA molecules of any of claims 1-56, a composition of any of claims 57-91, a nucleic acid of claim 92, a vector of any of claims 93-94, a cell (or population of cells) of any of claims 113-140 or 155, or a gene editing system of any of claims 156-162, for use in the treatment of a disease.

168. A gRNA molecule or the plurality of gRNA molecules of any of claims 1-56, a composition of any of claims 57-91, a nucleic acid of claim 92, a vector of any of claims 93-94, a cell (or population of cells) of any of claims 113-140 or 155, or a gene editing system of any of claims 156-162, for use in treating a disease associated with expression of a tumor antigen, optionally a proliferative disease, a precancerous condition, a cancer, or a non-cancer related indication associated with expression of the tumor antigen, by administering the gRNA molecule, composition, nucleic acid, vector, cell, population of cells, or gene editing system to a patient having the disease.

169. A gRNA molecule or the plurality of gRNA molecules of any of claims 1-56, a composition of any of claims 57-91, a nucleic acid of claim 92, a vector of any of claims 93-94, a cell (or population of cells) of any of claims 113-140 or 155, or a gene editing system of any of claims 156-162, for use in the treatment of a cancer, wherein the cancer is a hematologic cancer selected from the group consisting of chronic lymphocytic leukemia (CLL), acute leukemias, acute lymphoid leukemia (ALL), B-cell acute lymphoid leukemia (B-ALL), T-cell acute lymphoid leukemia (T-ALL), chronic myelogenous leukemia (CML), acute myeloid leukemia (AML), B cell prolymphocytic leukemia, blastic plasmacytoid dendritic cell neoplasm, Burkitt's lymphoma, diffuse large B cell lymphoma, follicular lymphoma, hairy cell leukemia, small cell- or a large cell-follicular lymphoma, malignant lymphoproliferative conditions, MALT lymphoma, mantle cell lymphoma, marginal zone lymphoma, multiple myeloma, myelodysplasia and myelodysplastic syndrome, non-Hodgkin's lymphoma, Hodgkin's lymphoma, plasmablastic lymphoma, plasmacytoid dendritic cell neoplasm, Waldenstrom macroglobulinemia, and pre-leukemia, by administering the gRNA molecule, composition, nucleic acid, vector, cell, population of cells, or gene editing system to a patient having the cancer.

170. The gRNA molecule, plurality of gRNA molecules, composition, nucleic acid, vector, cell or population of cells, or gene editing system for us of claim 169, wherein the cancer is acute lymphoid leukemia (ALL).

171. The gRNA molecule, plurality of gRNA molecules, composition, nucleic acid, vector, cell or population of cells, or gene editing system for us of claim 169, wherein the cancer is pediatric ALL.

172. The gRNA molecule, plurality of gRNA molecules, composition, nucleic acid, vector, cell or population of cells, or gene editing system for us of claim 169, wherein the cancer is diffuse large B cell lymphoma.

173. The gRNA molecule, plurality of gRNA molecules, composition, nucleic acid, vector, cell or population of cells, or gene editing system for us of claim 169, wherein the cancer is chronic lymphocytic leukemia.

174. The gRNA molecule, plurality of gRNA molecules, composition, nucleic acid, vector, cell or population of cells, or gene editing system for us of claim 169, wherein the cancer is follicular lymphoma.

175. The gRNA molecule, plurality of gRNA molecules, composition, nucleic acid, vector, cell or population of cells, or gene editing system for us of claim 169, wherein the cancer is Hodgkin lymphoma.

176. The gRNA molecule, plurality of gRNA molecules, composition, nucleic acid, vector, cell or population of cells, or gene editing system for us of claim 169, wherein the cancer is non-Hodgkin lymphoma.

177. A gRNA molecule or the plurality of gRNA molecules of any of claims 1-56, a composition of any of claims 57-91, a nucleic acid of claim 92, a vector of any of claims 93-94, a cell (or population of cells) of any of claims 113-140 or 155, or a gene editing system of any of claims 156-162, for use in the treatment of a cancer, optionally wherein the cancer is selected from the group consisting of mesothelioma, adenocarcinoma, glioblastoma, colon cancer, rectal cancer, renal-cell carcinoma liver cancer, non-small cell carcinoma of the lung, cancer of the small intestine, cancer of the esophagus, melanoma, bone cancer, pancreatic cancer, skin cancer, cancer of the head or neck, cutaneous or intraocular malignant melanoma, uterine cancer, ovarian cancer, rectal cancer, cancer of the anal region, stomach cancer, testicular cancer, carcinoma of the fallopian tubes, carcinoma of the endometrium, carcinoma of the cervix, carcinoma of the vagina, carcinoma of the vulva, Hodgkin's Disease, non-Hodgkin's lymphoma, cancer of the endocrine system, cancer of the thyroid gland, cancer of the parathyroid gland, cancer of the adrenal gland, sarcoma of soft tissue, cancer of the urethra, cancer of the penis, solid tumors of childhood, cancer of the bladder, cancer of the kidney or ureter, carcinoma of the renal pelvis, neoplasm of the central nervous system (CNS), primary CNS lymphoma, tumor angiogenesis, spinal axis tumor, brain stem glioma, pituitary adenoma, Kaposi's sarcoma, epidermoid cancer, squamous cell cancer, T-cell lymphoma, environmentally induced cancers, combinations of said cancers, and metastatic lesions of said cancers, by administering the gRNA molecule, composition, nucleic acid, vector, cell, population of cells, or gene editing system to a patient having the cancer.

178. The composition of any one of claims 72-91, wherein the CAR is a a plurality of antigen binding domains targeting two or more of a CD19 CAR, CD20 CAR, BCMA CAR, and CD22 CAR.

179. The composition of claim 178, wherein the two or more antigen binding domains are in tandem.

180. The composition of claim 178 or 179, wherein the two or more antigen binding domains are joined by a linker or hinge region.

181. The cell of any one of claims 125-140, wherein the CAR is a a plurality of antigen binding domains targeting two or more of a CD19 CAR, CD20 CAR, BCMA CAR, and CD22 CAR.

182. The composition of claim 181, wherein the two or more antigen binding domains are in tandem.

183. The composition of claim 181 or 182, wherein the two or more antigen binding domains are joined by a linker or hinge region.

184. A gRNA molecule comprising a tracr and crRNA, wherein the crRNA comprises a targeting domain that is complementary to a sequence within a genomic region selected from chr1:151340619-151343198, chr1:151343321-151343462, chr1:151343660-151343902, chr1:151344176-151344298, chr1:151344396-151344556, chr1:151344707-151344867, chr1:151345085-151345208, chr1:151345907-151345981, chr1:151346184-151346353, chr1:151346461-151346626, and chr1:151347190-151347313, wherein the genomic region is according to human reference genome hg38.
